(19) United States
(12) Patent Application Publication
(10) Pub. No.: US 2026/0035689 A1
(43) Pub. Date: Feb. 5, 2026

(54) REDIRECTION OF TROPISM OF AAV CAPSIDS

(71) Applicant: VOYAGER THERAPEUTICS, INC., Lexington, MA (US)

(72) Inventors: Mathieu E. Nonnenmacher, Boston, MA (US); Jinzhao Hou, Lexington, MA (US); Wei Wang, Lexington, MA (US)

(21) Appl. No.: 19/297,841

(22) Filed: Aug. 12, 2025

Related U.S. Application Data
(62) Division of application No. 17/282,479, now Pat. No. 12,467,046.
(60) Provisional application No. 62/740,310, filed on Oct. 2, 2018.
(60) Provisional application No. 62/839,883, filed on Apr. 29, 2019.

(51) Int. Cl. C12N 15/10; C07K 14/005

(52) U.S. Cl. CPC C12N 15/1037; C07K 14/005; C12N 2750/14122; C12N 2750/14145

(57) ABSTRACT

The disclosure relates to compositions, methods, and processes for the preparation, use, and/or formulation of adeno-associated virus capsid proteins, wherein the capsid proteins comprise targeting peptide inserts for enhanced tropism to a target tissue.

### CROSS REFERENCE TO RELATED APPLICATIONS

[0001] This application is a Divisional of U.S. patent application Ser. No. 17/282,479, filed Apr. 2, 2021, which is a 35 U.S.C. § 371 U.S. National Stage Entry of International Application No. PCT/US2019/054345, filed Oct. 2, 2019 and entitled REDIRECTION OF TROPISM OF AAV CAPSIDS; which claims the benefit of: U.S. Provisional Patent Application No. 62/740,310, filed Oct. 2, 2018, entitled AAV CAPSID LIBRARIES AND TISSUE TARGETING PEPTIDE INSERTS; U.S. Provisional Patent Application No. 62/839,883, filed Apr. 29, 2019 entitled REDIRECTION OF TROPISM OF AAV CAPSIDS; the contents of which are each incorporated herein by reference in their entirety.

### REFERENCE TO THE SEQUENCE LISTING

[0002] The present application is being filed along with a Sequence Listing submitted electronically in XML format and is hereby incorporated by reference in its entirety. Said XML copy, created on Aug. 11, 2025, is named V2071-1060USDIVI_SL.xml and is 1,679,340 bytes in size.

### FIELD OF THE DISCLOSURE

[0003] The disclosure relates to compositions, methods, and processes for the preparation, use, and/or formulation of adeno-associated virus capsid proteins, wherein the capsid proteins comprise targeting peptide inserts for enhanced tropism to a target tissue.

### BACKGROUND

[0004] Gene delivery to the adult central nervous system (CNS) remains a major challenge in gene therapy, and engineered AAV capsids with improved brain tropism represent an attractive solution.

[0005] Adeno-associated virus (AAV)-derived vectors are promising tools for clinical gene transfer because of their non-pathogenic nature, their low immunogenic profile, low rate of integration into the host genome and long-term transgene expression in non-dividing cells. However, the transduction efficiency of AAV natural variants in certain organs is too low for clinical applications, and capsid neutralization by pre-existing neutralizing antibodies may prevent treatment of a large proportion of patients. For these reasons, major efforts have been devoted to obtaining novel capsid variants with enhanced properties. Of many approaches tested so far, the most significant advances have resulted from directed evolution of AAV capsids using in vitro or in vivo selection of capsid variants created by capsid sequence randomization using either error-prone PCR, shuffling of various parent serotypes or insertion of fully randomized short peptides at defined positions.

[0006] In order to perform directed evolution of AAV capsids, the sequence encoding the viral capsid is itself flanked by inverted terminal repeats (ITR) so it can be packaged into its own capsid shell. Following infection of cultured cells or animals by the mixed population of capsids, the DNA encoding capsids variants that have successfully homed into the tissue of interest is recovered by PCR for further rounds of selection. In this approach, all viral DNA species present in a given tissue are recovered, with no discrimination for specific cell types or for vectors able to perform complete transduction (cell surface binding, endocytosis, trafficking, nuclear import, uncoating, second-strand synthesis, transcription). For example, in the case of highly complex tissues containing multiple cell types, such as the central nervous system (CNS), it would be highly preferable to apply a more stringent selective pressure aimed at recovering capsid variants capable of transducing neuron and/or astrocyte rather than microglia or blood vessel endothelial cells.

[0007] Attempts at improving the CNS tropism of AAV capsids upon systemic administration have been met with limited success.

[0008] Two previous approaches have been used to address this issue. The first strategy used co-infection of cultured cells (Grimm et al., 2008) or in situ animal tissue (Lisowski et al., 2014) with adenovirus, in order to trigger exponential replication of infectious AAV DNA. Another successful approach involved the use of cell-specific CRE transgenic mice (Deverman et al., 2016) allowing viral DNA recombination specifically in astrocytes, followed by recovery of CRE-recombined capsid variants. Both approaches proved successful, allowing the isolation of several capsid variants with enhanced transduction of target cell populations.

[0009] This finding suggested that cell type-specific library selection could improve the outcome of directed evolution. However, the transgenic CRE system used by Deverman et al. is not tractable in other animal species and AAV variants selected by directed evolution in mouse tissue do not show similar properties in large animals. Therefore, it would be necessary to perform the entire directed evolution process directly in non-human primates to increase the probability of translatability in human subjects. None of the previously described transduction-specific approaches are amenable to large animal studies because: 1) many tissues of interest (e.g. CNS) are not readily accessible to adenovirus co-infection, 2) the specific Ad tropism itself would bias the library distribution, and 3) large animals are typically not amenable to transgenesis and cannot be genetically engineered to express CRE recombinase in defined cell types.

[0010] To address this problem, we have developed a broadly-applicable functional AAV capsid library screening platform for cell type-specific biopanning in non-transgenic animals. In the TRACER (Tropism Redirection of AAV by Cell type-specific Expression of RNA) platform system, the capsid gene is placed under the control of a cell type-specific promoter to drive capsid mRNA expression in the absence of helper virus co-infection. This RNA-driven screen increases the selective pressure in favor of capsid variants which transduce a specific cell type.

[0011] The TRACER platform allows generation of AAV capsid libraries whereby specific recovery and subcloning of capsid mRNA expressed in transduced cells is achieved with no need for transgenic animals or helper virus co-infection. Since mRNA transcription is a hallmark of full transduction, these methods will allow identification of fully infectious AAV capsid mutants. In addition to its higher stringency, this method allows identification of capsids with high tropism for particular cell types using libraries designed to express CAP mRNA under the control of any cell-specific promoter such as, but not limited to, synapsin-1 promoter (neurons), GFAP promoter (astrocytes), TBG promoter (liver), CAMK promoter (skeletal muscle), MYH6 promoter (cardiomyocytes).

### SUMMARY OF THE DISCLOSURE

[0012] The present disclosure provides compositions and methods for the engineering and/or redirecting the tropism of AAV capsids. Also provided herein are peptides which may be inserted into AAV capsid sequences to increase the tropism of the capsid for a particular tissue. In one aspect, the peptides may be used to target the capsids to brain or regions of the brain or the spinal cord.

[0013] The present disclosure presents methods for generating one or more variant AAV capsid polypeptides. In certain embodiments, the variant AAV capsid polypeptides exhibit at least one of improved transduction or increased cell or tissue specificity, relative to a parental AAV capsid polypeptide. In certain embodiments, the method includes: (a) generating a library of variant AAV capsid polypeptides, wherein said library includes (i) a plurality of capsid polypeptides having a region of randomized sequence of 2, 3, 4, 5, 6, 7, 8, or 9 consecutive amino acids, or (ii) a plurality of capsid polypeptides from more than one parental AAV capsid polypeptide; (b) generating an AAV vector library by cloning the capsid polypeptides of libraries (a) (i) or (a) (ii) into AAV vectors, wherein the AAV vectors include a first promoter and a second promoter, wherein said second promoter drives capsid mRNA expression in the absence of helper virus co-infection.

[0014] In certain embodiments, the first promoter is AAV2 P40. In certain embodiments, the second promoter is a ubiquitous promoter. In certain embodiments, the first promoter is AAV2 P40 and the second promoter is a ubiquitous promoter.

[0015] In certain embodiments, the first promoter is AAV2 P40. In certain embodiments, the second promoter is a cell-type-specific promoter. In certain embodiments, the first promoter is AAV2 P40 and the second promoter is a cell-type-specific promoter.

[0016] In certain embodiments, the promoter is selected from any promoter listed in Table 3. In certain embodiments, the ubiquitous or cell-specific promoter allows the expression of RNA encoding the capsid polypeptides.

[0017] In certain embodiments, the method includes recovery of the RNA encoding the capsid polypeptides. In certain embodiments, the method includes determining the sequence of the capsid polypeptides. In certain embodiments, the capsid polypeptides recovered exhibit increased target cell transduction or target cell specificity (tropism) as compared to a parental capsid polypeptide.

[0018] In certain embodiments, the target cell is a neuronal cell, a neural stem cell, an astrocyte, an oligodendrocyte, a microglia cell, a retinal cell, a tumor cell, a hematopoietic stem cell, an insulin producing beta cell, a lung epithelium cell, an endothelial cell, a liver cell, a skeletal muscle cell, a muscle stem cell, a muscle satellite cell, or a cardiac muscle cell.

[0019] In certain embodiments, the AAV vectors comprise a first promoter and a second promoter, wherein the second promoter is located the downstream of the capsid gene and drives its anti-sense RNA expression in the absence of helper virus co-infection.

[0020] In certain embodiments, the first promoter is AAV2 P40 and the second promoter is a ubiquitous promoter. In certain embodiments, the first promoter is AAV2 P40 and the second promoter is a cell-specific promoter. In certain embodiments, the ubiquitous or cell-specific promoter allows the expression of gene encoding the capsid polypeptide of variant AAV in an anti-sense direction, resulting in the anti-sense RNA. In certain embodiments, the method included the recovery of the anti-sense RNA that can be converted to RNA encoding the variant AAV capsid polypeptide that is used to determine the sequence of the variant AAV capsid polypeptides.

[0021] In certain embodiments, the variant AAV capsid polypeptide exhibits increased target cell transduction or target cell specificity (tropism) as compared to a parental capsid polypeptide.

### BRIEF DESCRIPTION OF THE DRAWINGS

[0022] The foregoing and other objects, features, and advantages will be apparent from the following description of particular embodiments of the disclosure, as illustrated in the accompanying drawings. The drawings are not necessarily to scale, emphasis instead being placed upon illustrating the principles of various embodiments of the disclosure.

[0023] FIG. 1A and FIG. 1B are maps of wild-type AAV capsid gene transcription and CMV-CAP vectors. FIG. 1A shows transcription of VP1, VP2 and VP3 AAV transcripts from wildtype AAV genome. Transcription start sites of each viral promoter are indicated. SD, splice donor, SA, splice acceptor. Sequence of start codons for each reading frame is indicated. Translation of AAP and VP3 is performed by leaky scanning of the major mRNA. FIG. 1B shows the structure of the CMV-p40 dual promoter vectors used to determine the minimal regulatory sequences necessary for efficient virus production. The pREP2ACAP vector shown at the bottom is obtained by deletion of most CAP reading frame and is used to provide the REP protein in trans.

[0024] FIG. 2A and FIG. 2B are histogram representations of the data and show the effect of CMV promoter position on virus yield and CAP mRNA splicing. FIG. 2A shows average yield of AAV9 produced in HEK-293T cells using the constructs described in FIG. 1, co-transfected with an Ad Helper vector. Wild-type AAV9 plasmid (pAV9) is used as a positive control. Y-axis values indicate AAV DNA copies per ul from each 15-cm plate (˜1000 ul total, left panel) or the percentage of wtAAV9 (right panel). FIG. 2B shows evidence for expression of CAP transcripts in transfected cells. mRNA from transfected 293T cells was subjected to RT-PCR using primers specific for the major spliced CAP transcript. Note the lack of p40-driven transcription in the absence of Ad Helper vector (lane 2).

[0025] FIG. 3A, FIG. 3B and FIG. 3C show the effect of REP helper plasmid optimization on virus yield. FIG. 3A shows the design of improved pREP helper vectors. The MscI fragment deletion removes the C-terminal part of VP proteins, which is necessary for capsid formation. Asterisks represent early stop codons introduced to disrupt the coding potential of VP1, VP2 and VP3 reading frames. FIG. 3B shows the yield of Synapsin-p40-CAP9 AAV produced with various REP plasmid architectures. Values on the Y-axis represent the percentage of VG relative to wild-type AAV9. FIG. 3C shows the quantification of recombination and/or illegitimate packaging of full-length REP from the pREP plasmids. Virus stocks produced were subjected to qPCR using Taqman probes located in the N-terminal part of REP absent from the ITR-containing vectors.

[0026] FIG. 4A, FIG. 4B, FIG. 4C and FIG. 4D describe the in vivo analysis of the second-generation vectors. FIG. 4A shows the design of Pro9 vectors. Architecture of all three vectors is based on the BstEII construct. AAV9 capsid RNA is placed under control of P40 and CMV, hSyn1 or GFAP promoters, respectively. FIG. 4B shows the silver stain of SDS-PAGE gel obtained by running 1e10 VG of each vector, after double iodixanol purification. FIG. 4C shows the biodistribution of viral DNA in mouse brain (cortex), liver and heart following tail-vein injection of 1e12 VG per mouse. AAV9 VP3 DNA is quantified by Taqman PCR and normalized to mouse transferrin receptor gene. FIG. 4D shows the capsid RNA recovery from mouse tissues. Total RNA was reverse transcribed and Taqman PCR was performed with capsid-specific Taqman primers and probe. Values represent VP3 cDNA copies normalized to TBP housekeeping gene.

[0027] FIG. 5A, FIG. 5B, FIG. 5C, FIG. 5D and FIG. 5E describes in vitro analysis of intronic second generation vectors. FIG. 5A shows the design of intronic Pro9 vectors harboring a hybrid CMV/Globin intron. AAV9 capsid RNA is placed under control of P40 and CBA, hSyn1 or GFAP promoters in a tandem configuration (top) or in an inverted configuration (bottom). In the inverted promoter vectors, an extra SV40 polyadenylation site (orange) is added at the 3′ extremity to allow polyadenylation of antisense CAP9 transcripts. FIG. 5B shows the AAV9 CAP cDNA amplification. All vectors depicted were produced using triple transfection with pHelper and pREP-3stops and resulting viruses were used to infect HEK-293T cells at a MOI of 1e4 VG per cell. RNA was extracted 48 hours post-infection and subjected to RT-PCR with primers amplifying full capsid (top) or a C-terminal fragment (bottom). FIG. 5C shows the AAV9 VP3 cDNA from cells infected with intronless or intronic viruses with tandem promoters in forward orientation was quantified by Taqman PCR and normalized to GAPDH housekeeping gene. Values indicate the ratio of VP3 to GAPDH cDNA. FIG. 5D shows the mapping of capsid RNA recovery from cells infected with tandem or inverted constructs. Total RNA was reverse transcribed and PCR was performed with primers flanking the entire capsid gene. White arrowheads represent VP3 size variants resulting from aberrant splicing of antisense CAP mRNA. FIG. 5E shows the analysis of Globin intron splicing. CAG9 plasmid (left) or cDNA from HEK-293T cells transduced by CAG9 virus was submitted to PCR with forward primers located before (Glo ex1) or within (GloSpliceF4 (SEQ ID NO: 26) and GloSpliceF6 (SEQ ID NO: 13)) the Globin exon-exon junction. Primers spanning junction between exon 1 (no underline) and exon 2 (underline) are described at the bottom.

[0028] FIG. 6 provides in vitro evidence that the presence of the P40 promoter downstream of Synapsin or Gfabc1D promoters does not relieve the repression of either promoter in HEK-293T cells.

[0029] FIG. 7 illustrates the basic tenets of the TRACER platform.

[0030] FIG. 8 illustrates features of the TRACER platform including the use of a tissue specific promoter and RNA recovery.

[0031] FIG. 9 provides one embodiment of the TRACER production architecture.

[0032] FIG. 10 provides a comparison between traditional vDNA recovery and 2nd generation vRNA recovery.

[0033] FIG. 11 provides an overview of the use of cell-specific RNA expression for targeted evolution.

[0034] FIG. 12A and FIG. 12B provide diagrams representing capsid gene transcription of natural AAV (FIG. 12A) and TRACER libraries (FIG. 12B).

[0035] FIG. 13 is a diagram of the AAV6, AAV5 and AAV-DJ capsid peptide display libraries used for in vivo evolution (SEQ ID NOS 27-32, respectively, in order of appearance).

[0036] FIG. 14 is a diagram of the AAV9 capsid peptide display libraries used for in vivo evolution (SEQ ID NOS 33-42, respectively, in order of appearance).

[0037] FIG. 15A and FIG. 15B present the method used for library construction. FIG. 15A shows the sequence of the insertion site used to introduce random libraries (SEQ ID NOS 43-46, respectively, in order of appearance). FIG. 15B provides a description of the assembly procedure.

[0038] FIG. 16 provides an exemplary diagram of cloning-free rolling circle procedure used for library amplification (SEQ ID NO 47; NNK₇).

[0039] FIG. 17 provides the sequence of the codon-mutant AAV9 library shuttle designed to minimize wild-type contamination (SEQ ID NOS 33-34 and 48-52, respectively, in order of appearance).

[0040] FIG. 18 provides a description of AAV9 peptide libraries biopanning.

[0041] FIG. 19 illustrates the recovery process from an initial pool with recovery at 50%.

[0042] FIG. 20 provides an example of the cDNA recovery and amplification from GFAP-driven libraries (B group and F group).

[0043] FIG. 21A, FIG. 21B and FIG. 21C show the progression of AAV9 peptide library diversity throughout the biopanning process. FIG. 21A describes RNA library evolution. FIG. 21B and FIG. 21C show the amino acid distribution of NNK machine mix preparations for P0 and P1 virus.

[0044] FIG. 22 provides neuron (SYN)-AAV9 Peptide Libraries Composition at P2.

[0045] FIG. 23 provides astrocyte (GFAP)-AAV9 Peptide Libraries Composition at P2.

[0046] FIG. 24 provides an estimation of brain/liver specificity in GFAP-AAV9 peptide library candidates.

[0047] FIG. 25 provides an estimation of brain/liver specificity in GFAP-AAV9 peptide library candidates.

[0048] FIG. 26 provide an example subpopulation selection of variants.

[0049] FIG. 27 provides an exemplary design of a library generation and cloning procedure.

[0050] FIG. 28 provides the NNK/NNM codon distribution (covariance of codon mutants) of AAV produced with a synthetic library of 666 sequence variants (GFAP promoter).

[0051] FIG. 29 provides the NNK/NNM codon distribution (covariance of codon mutants) of AAV produced with a synthetic library of 666 sequence variants (SYN9 promoter).

[0052] FIG. 30 provides the data from the tissue recovery, one-month post injection, from brain and a liver punch.

[0053] FIG. 31A, FIG. 31B, FIG. 31C and FIG. 31D provide results of control capsids from the Syn-driven synthetic library NGS analysis. FIG. 31A shows the enrichment analysis of internal AAV9, PHP.B and PHP.eB controls (SEQ ID NOS 53-58 and 53-58, respectively, in order of appearance). FIG. 31B, FIG. 31C and FIG. 31D show the NNK/NNM codon distribution in mRNA from mouse brain tissue.

[0054] FIG. 32A and FIG. 32B provide the results of the neuron synthetic library NGS analysis (SEQ ID NOS 59-60, 59-61, 61-63, 62, 64, 64, 63, 65-67, 67, 65, 68, 66, 69, 70-71, and 70-74, respectively, in order of appearance).

[0055] FIG. 33 provides the results of the astrocyte synthetic library NGS analysis (SEQ ID NOS 53-58, 53-58, and 53-58, respectively, in order of appearance).

[0056] FIG. 34A and FIG. 34B provide astrocyte synthetic library codon mutants covariance.

[0057] FIG. 35 provides the results of the astrocyte synthetic library NGS analysis (SEQ ID NOS 75, 75-78, 76-77, 79-83, 65, 78, 84, 80, 85, 70, 86, 82, 81, 79, 87, 65, 85, 84, 70, 86, 88-90, 87, 91, 83, 88, 63, 89-90, 92-93, 91, 94-97, 93, 95, 98, 98, 97, 63, 92, 94, 99-101, 75, 75-78, 76-77, 79-83, 65, 78, 84, 80, 85, 70, 86, 82, 81, 79, 87, 65, 85, 84, 70, 86, 88-90, 87, 91, 83, 88, 63, 89-90, 92-93, 91, 94-97, 93, 95, 98, 98, 97, 63, 92, 94, 99-102, 99, 103, 103-104, 96, 105-106, 101, 100, 102, 107, 104-105, 108-113, 106, 60, 66, 114-117, 109, 113, 72, 108, 110, 67, 118-119, 116, 120, 120, 107, 112, 121-123, 66, 124-125, 115, 118, 126, 121, 127-128, 60, 129, 119, 130-132, 72, 133, 123, 125, 69, 134-139, 62, 124, 67, 111, 114, 126, 140-141, 122, 142, 128-129, 143, 138, 144, 134, 62, 136, 145, 141, 146-153, 127, 154, 69, 144, 155, 71, 156, 133, 132, 137, 147, 157-158, 135, 159, 140, 117, 160, 139, 161-162, 130, 163, 143, 164, 152, 151, 165-167, 155, 168, 71, 169, and 146, respectively, in order of appearance).

[0058] FIG. 36 provides the GFAP synthetic library NGS analysis.

[0059] FIG. 37A and FIG. 37B provides the top 38 variants from the synthetic library screen. FIG. 37A shows the phylogenetic analysis of 9-mer peptide sequences, and also shows the sequence of the peptide variants (SEQ ID NOS 67, 59, 64, 61, 77, 84, 96, 60, 80, 82, 66, 62, 83, 85, 106, 131, 94, 90, 76, 68-69, 79, 75, 81, 88, 139, 78, 155, 102, 63, 140, 87, 70, 105, 120, 89, 65, and 109, respectively, in order of appearance). Highlighted sequences represent the peptides that were selected for individual transduction assay. FIG. 37B shows the graphic representation of the neuron and astrocyte tropism of each peptide, both axis indicate the inverted rank in Synapsin and GFAP screen.

[0060] FIG. 38 provides the top consensus sequences as compared to PHP.N and PHP.B (SEQ ID NOS 168 and 71, respectively, in order of appearance).

[0061] FIG. 39 is a diagram of the Gibson assembly library cloning procedure.

[0062] FIG. 40 provides an example of TRIM/NNK peptide prevalence (SEQ ID NOS 170-171, respectively, in order of appearance).

[0063] FIG. 41 provides peptide diversity statistics from a study using the Illumina adapter having 42 million bacterial transformants, 81 million sequence reads and 12 million sequence variants (SEQ ID NOS 172-173, 48-49, and 174-175, respectively, in order of appearance).

[0064] FIG. 42 provides an exemplary diagram of cloning-free DNA amplification by rolling circle amplification.

[0065] FIG. 43 provides a diagram of protelomerase monomer processing (SEQ ID NOS 176-178, respectively, in order of appearance).

[0066] FIG. 44 provides a diagram comparing the traditional and cloning-free methods.

[0067] FIG. 45A and FIG. 45C provide the full ranking of Syn-driven (FIG. 45A) and GFAP-driven (FIG. 45B) 333 variants in the brain, spinal cord, liver and heart tissues. Capsid variants are ranked by their average brain RNA enrichment score (average of NNK and NNM codons). The rank of internal control capsids PHP.B, PHP.eB and AAV9 is indicated (FIG. 45A and FIG. 45B). A comparison of combined Syn-driven results and GFAP-driven results is provided (FIG. 45C). Only 4 animals were represented for the GFAP-driven libraries because 2/6 mice showed a very different ranking profile and were considered as outliers.

[0068] FIG. 46A and FIG. 46B provide the comparison of results of the neuron and astrocyte synthetic library NGS analysis. FIG. 46A shows the ranking of capsids using SYN or GFAP promoters; FIG. 46B shows the scatter plot showing the correlation of Syn-versus GFAP-driven libraries.

[0069] FIG. 47 illustrates one embodiment of a multi-species (e.g., rodent) study followed by next generation sequencing (NGS).

[0070] FIG. 48A, FIG. 48B and FIG. 48C provide results from a multi-strain/species comparison of 333 capsid variants. FIG. 48A shows the ranking of 333 capsids by brain RNA enrichment score in C57BL/6 mice, BALB/C mice and rats. Capsids are ranked according to Syn-driven brain enrichment score in C57BL/6 mice. FIG. 48B shows the scatter plots showing the correlation between C57BL/6 and BALB/C enrichment scores from Syn- and GFAP-driven pools. FIG. 48C shows the Venn diagram showing the intersection and consensus sequence of capsids with a brain enrichment score >10-fold higher than AAV9 (either Syn- or GFAP-driven) in C57BL/6 and BALB/C strains. In rats, no capsid showed an enrichment score >10-fold versus AAV9.

[0071] FIG. 49A, FIG. 49B, FIG. 49C and FIG. 49D provide transduction (RNA) and biodistribution (DNA) analysis of 10 capsid variants indicated in FIG. 49A (SEQ ID NOS 179-188, respectively, in order of appearance). Individual capsids were used to package self-complementary CBA-EGFP genomes (FIG. 49B) and injected intravenously to C57BL/6 mice. FIG. 49C shows the RNA expression in brain and spinal cord samples. FIG. 49D shows the DNA distribution in brain and spinal cord samples.

[0072] FIG. 50A, FIG. 50B and FIG. 50C provide the results of testing of individual capsids and their mRNA expression in brain, spinal cord and liver. EGFP mRNA expression results are shown for the brain (FIG. 50A), the spinal cord (FIG. 50B) and the liver (FIG. 50C).

[0073] FIG. 51 provides results for NGS screening using neuronal NeuN marker (FIG. 51) for both GFAP screening and SYN screening.

[0074] FIG. 52 provides the results of testing of individual capsids in whole brain.

[0075] FIG. 53 provides the results of testing of additional individual capsids in whole brain.

[0076] FIG. 54 provides the results of testing of individual capsids in cerebellum.

[0077] FIG. 55 provides the results of testing of individual capsids in cortex.

[0078] FIG. 56 provides the results of testing of individual capsids in hippocampus.

[0079] FIG. 57A and FIG. 57B provide transduction data of 10 capsid variants in mouse liver (FIG. 57B), analyzed by EGFP RNA expression and whole tissue fluorescence (FIG. 57A).

[0080] FIG. 58A and FIG. 58B provide results for comparison studies on the efficacy of the 333 capsid variants to transduce CNS for C57BL/6 mice BMVEC (FIG. 58A) and Human BMVEC (FIG. 58B).

[0081] FIG. 59A, FIG. 59B and FIG. 57C provide diagrams of external barcoding for NGS analysis and recovery of full-length capsid variants. A general barcode pair is shown (FIG. 59C). Full ITR-to-ITR constructs are shown with the barcode pair 5′ of the CAP sequence (FIG. 59A) and 3′ of the CAP sequence (FIG. 59B).

[0082] FIG. 60A, FIG. 60B and FIG. 60C provide detailed analysis of virus production and RNA splicing with several configurations of intronic barcoded platforms. A general ITR-to-ITR construct is shown in FIG. 60A (SEQ ID NOS 189-193, respectively, in order of appearance), with intronic barcode yields (FIG. 60B) and gel columns showing AAV intron splicing and Globin intron splicing results (FIG. 60C).

### DETAILED DESCRIPTION OF THE DISCLOSURE

[0083] The details of one or more embodiments of the disclosure are set forth in the accompanying description below. Although any materials and methods similar or equivalent to those described herein can be used in the practice or testing of the present disclosure, the preferred materials and methods are now described. Other features, objects and advantages of the disclosure will be apparent from the description. In the description, the singular forms also include the plural unless the context clearly dictates otherwise. Unless defined otherwise, all technical and scientific terms used herein have the same meaning as commonly understood by one of ordinary skill in the art to which this disclosure belongs. In the case of conflict, the present description will control.

[0084] According to the present disclosure, AAV particles with enhanced tropism for a target tissue (e.g., CNS) are provided, as well as associated processes for their targeting, preparation, formulation and use. Targeting peptides and nucleic acid sequences encoding the targeting peptides are provided. These targeting peptides may be inserted into an AAV capsid protein sequence to alter tropism to a particular cell-type, tissue, organ or organism, in vivo, ex vivo or in vitro.

[0085] As used herein, an “AAV particle” or “AAV vector” comprises a capsid protein and a viral genome, wherein the viral genome comprises at least one payload region and at least one inverted terminal repeat (ITR). The AAV particle and/or its component capsid and viral genome may be engineered to alter tropism to a particular cell-type, tissue, organ or organism.

[0086] As used herein, “viral genome” or “vector genome” refers to the nucleic acid sequence(s) encapsulated in an AAV particle. A viral genome comprises a nucleic acid sequence with at least one payload region encoding a payload and at least one ITR.

[0087] As used herein, a “payload region” is any nucleic acid molecule which encodes one or more “payloads” of the disclosure. As non-limiting examples, a payload region may be a nucleic acid sequence encoding a payload comprising an RNAi agent or a polypeptide.

[0088] As used herein, a “targeting peptide” refers to a peptide of 3-20 amino acids in length. These targeting peptides may be inserted into, or attached to, a parent amino acid sequence to alter the characteristics (e.g., tropism) of the parent protein. As a non-limiting example, the targeting peptide can be inserted into an AAV capsid sequence for enhanced targeting to a desired cell-type, tissue, organ or organism.

[0089] The AAV particles and payloads of the disclosure may be delivered to one or more target cells, tissues, organs, or organisms. In a preferred embodiment, the AAV particles of the disclosure demonstrate enhanced tropism for a target cell type, tissue or organ. As a non-limiting example, the AAV particle may have enhanced tropism for cells and tissues of the central or peripheral nervous systems (CNS and PNS, respectively). The AAV particles of the disclosure may, in addition, or alternatively, have decreased tropism for an undesired target cell-type, tissue or organ.

[0090] Adeno-associated viruses (AAV) are small non-enveloped icosahedral capsid viruses of the Parvoviridae family characterized by a single stranded DNA viral genome. Parvoviridae family viruses consist of two subfamilies: Parvovirinae, which infect vertebrates, and Densovirinae, which infect invertebrates. The Parvoviridae family comprises the Dependovirus genus which includes AAV, capable of replication in vertebrate hosts including, but not limited to, human, primate, bovine, canine, equine, and ovine species.

[0091] The parvoviruses and other members of the Parvoviridae family are generally described in Kenneth I. Berns, “Parvoviridae: The Viruses and Their Replication,” Chapter 69 in FIELDS VIROLOGY (3d Ed. 1996), the contents of which are incorporated by reference in their entirety.

[0092] AAV have proven to be useful as a biological tool due to their relatively simple structure, their ability to infect a wide range of cells (including quiescent and dividing cells) without integration into the host genome and without replicating, and their relatively benign immunogenic profile. The genome of the virus may be manipulated to contain a minimum of components for the assembly of a functional recombinant virus, or viral particle, which is loaded with or engineered to target a particular tissue and express or deliver a desired payload.

[0093] The wild-type AAV vector genome is a linear, single-stranded DNA (ssDNA) molecule approximately 5,000 nucleotides (nt) in length. Inverted terminal repeats (ITRs) traditionally cap the viral genome at both the 5′ and the 3′ end, providing origins of replication for the viral genome. While not wishing to be bound by theory, an AAV viral genome typically comprises two ITR sequences. These ITRs have a characteristic T-shaped hairpin structure defined by a self-complementary region (145 nt in wild-type AAV) at the 5′ and 3′ ends of the ssDNA which form an energetically stable double stranded region. The double stranded hairpin structures comprise multiple functions including, but not limited to, acting as an origin for DNA replication by functioning as primers for the endogenous DNA polymerase complex of the host viral replication cell.

[0094] The wild-type AAV viral genome further comprises nucleotide sequences for two open reading frames, one for the four non-structural Rep proteins (Rep78, Rep68, Rep52, Rep40, encoded by Rep genes) and one for the three capsid, or structural, proteins (VP1, VP2, VP3, encoded by capsid genes or Cap genes). The Rep proteins are important for replication and packaging, while the capsid proteins are assembled to create the protein shell of the AAV, or AAV capsid. Alternative splicing and alternate initiation codons and promoters result in the generation of four different Rep proteins from a single open reading frame and the generation of three capsid proteins from a single open reading frame. Though it varies by AAV serotype, as a non-limiting example, for AAV9/hu.14 (SEQ ID NO: 123 of U.S. Pat. No. 7,906,111, the contents of which are herein incorporated by reference in their entirety) VP1 refers to amino acids 1-736, VP2 refers to amino acids 138-736, and VP3 refers to amino acids 203-736. In other words, VP1 is the full-length capsid sequence, while VP2 and VP3 are shorter components of the whole. As a result, changes in the sequence in the VP3 region, are also changes to VP1 and VP2, however, the percent difference as compared to the parent sequence will be greatest for VP3 since it is the shortest sequence of the three. Though described here in relation to the amino acid sequence, the nucleic acid sequence encoding these proteins can be similarly described. Together, the three capsid proteins assemble to create the AAV capsid protein. While not wishing to be bound by theory, the AAV capsid protein typically comprises a molar ratio of 1:1:10 of VP1:VP2:VP3. As used herein, an “AAV serotype” is defined primarily by the AAV capsid. In some instances, the ITRs are also specifically described by the AAV serotype (e.g., AAV2/9).

[0095] AAV vectors of the present disclosure may be produced recombinantly and may be based on adeno-associated virus (AAV) parent or reference sequences. As used herein, a “vector” is any molecule or moiety which transports, transduces, or otherwise acts as a carrier of a heterologous molecule such as the nucleic acids described herein.

[0096] In addition to single stranded AAV viral genomes (e.g., ssAAVs), the present disclosure also provides for self-complementary AAV (scAAVs) viral genomes. scAAV vector genomes contain DNA strands which anneal together to form double stranded DNA. By skipping second strand synthesis, scAAVs allow for rapid expression in the transduced cell.

[0097] In one embodiment, the AAV particle of the present disclosure is an scAAV.

[0098] In one embodiment, the AAV particle of the present disclosure is an ssAAV.

[0099] Methods for producing and/or modifying AAV particles are disclosed in the art such as pseudotyped AAV vectors (PCT Patent Publication Nos. WO200028004; WO200123001; WO2004112727; WO2005005610; and WO2005072364, the content of each of which is incorporated herein by reference in its entirety).

[0100] In one embodiment, the AAV particles of the disclosure comprising a capsid with an inserted targeting peptide and a viral genome, may have enhanced tropism for a cell-type or tissue of the human CNS.

### AAV Capsids

[0101] AAV particles of the present disclosure may comprise or be derived from any natural or recombinant AAV serotype. AAV serotypes may differ in characteristics such as, but not limited to, packaging, tropism, transduction and immunogenic profiles. While not wishing to be bound by theory, the AAV capsid protein is often considered to be the driver of AAV particle tropism to a particular tissue.

[0102] In one embodiment, an AAV particle may have a capsid protein and ITR sequences derived from the same parent serotype (e.g., AAV2 capsid and AAV2 ITRs). In another embodiment, the AAV particle may be a pseudo-typed AAV particle, wherein the capsid protein and ITR sequences are derived from different parent serotypes (e.g., AAV9 capsid and AAV2 ITRs; AAV2/9).

[0103] The AAV particles of the present disclosure may comprise an AAV capsid protein with a targeting peptide inserted into the parent sequence. The parent capsid or serotype may comprise or be derived from any natural or recombinant AAV serotype. As used herein, a “parent” sequence is a nucleotide or amino acid sequence into which a targeting sequence is inserted (i.e., nucleotide insertion into nucleic acid sequence or amino acid sequence insertion into amino acid sequence).

[0104] In a preferred embodiment, the parent AAV capsid nucleotide sequence is as set forth in SEQ ID NO: 1.

[0105] In another embodiment, the parent AAV capsid nucleotide sequence is a K449R variant of SEQ ID NO: 1, wherein the codon encoding a lysine (e.g., AAA or AAG) at position 449 in the amino acid sequence (nucleotides 1345-1347) is exchanged for one encoding an arginine (CGT, CGC, CGA, CGG, AGA, AGG). The K449R variant has the same function as wild-type AAV9.

[0106] In one embodiment, the parent AAV capsid amino acid sequence is as set forth in SEQ ID NO: 2.

[0107] In another embodiment, the parent AAV capsid amino acid sequence is as set forth in SEQ ID NO: 3.

[0108] In one embodiment the parent AAV capsid sequence is any of those shown in Table 1.

TABLE 1
AAV Capsid Sequences

| | SEQ | |
|---|---|---|
| Serotype | ID NO | Reference Information |
| AAV9/hu.14 (nt) | 1 | U.S. Pat. No. 7,906,111 SEQ ID NO: |
| | | 3; WO2015038958 SEQ ID NO: 11 |
| AAV9/hu.14 (aa) | 2 | U.S. Pat. No. 7,906,111 SEQ ID NO: |
| | | 123; WO2015038958 SEQ ID NO: 2 |
| AAV9/hu.14 K449R (aa) | 3 | WO2017100671 SEQ ID NO: 45 |

[0109] Each of the patents, applications and or publications listed in Table 1 are hereby incorporated by reference in their entirety.

[0110] The parent AAV serotype and associated capsid sequence may be any of those known in the art. Non-limiting examples of such AAV serotypes include, AAV9, AAV9 K449R (or K449R AAV9), AAV1, AAVrh10, AAV-DJ, AAV-DJ8, AAV5, AAVPHP.B (PHP.B), AAVPHP.A (PHP.A), AAVG2B-26, AAVG2B-13, AAVTH1.1-32, AAVTH1.1-35, AAVPHP.B2 (PHP.B2), AAVPHP.B3 (PHP.B3), AAVPHP.N/PHP.B-DGT, AAVPHP.B-EST, AAVPHP.B-GGT, AAVPHP.B-ATP, AAVPHP.B-ATT-T, AAVPHP.B-DGT-T, AAVPHP.B-GGT-T, AAVPHP.B-SGS, AAVPHP.B-AQP, AAVPHP.B-QQP, AAVPHP.B-SNP (3), AAVPHP.B-SNP, AAVPHP.B-QGT, AAVPHP.B-NQT, AAVPHP.B-EGS, AAVPHP.B-SGN, AAVPHP.B-EGT, AAVPHP.B-DST, AAVPHP.B-DST, AAVPHP.B-STP, AAVPHP.B-PQP, AAVPHP.B-SQP, AAVPHP.B-QLP, AAVPHP.B-TMP, AAVPHP.B-TTP, AAVPHP.S/G2A12, AAVG2A15/G2A3 (G2A3), AAVG2B4 (G2B4), AAVG2B5 (G2B5), PHP.S, AAV2, AAV2G9, AAV3, AAV3a, AAV3b, AAV3-3, AAV4, AAV4-4, AAV6, AAV6.1, AAV6.2, AAV6.1.2, AAV7, AAV7.2, AAV8, AAV9.11, AAV9.13, AAV9.16, AAV9.24, AAV9.45, AAV9.47, AAV9.61, AAV9.68, AAV9.84, AAV9.9, AAV10, AAV11, AAV12, AAV16.3, AAV24.1, AAV27.3, AAV42.12, AAV42-1b, AAV42-2, AAV42-3a, AAV42-3b, AAV42-4, AAV42-5a, AAV42-5b, AAV42-6b, AAV42-8, AAV42-10, AAV42-11, AAV42-12, AAV42-13, AAV42-15, AAV42-aa, AAV43-1, AAV43-12, AAV43-20, AAV43-21, AAV43-23, AAV43-25, AAV43-5, AAV44.1, AAV44.2, AAV44.5, AAV223.1, AAV223.2, AAV223.4, AAV223.5, AAV223.6, AAV223.7, AAV1-7/rh.48, AAV1-8/rh.49, AAV2-15/rh.62, AAV2-3/rh.61, AAV2-4/rh.50, AAV2-5/rh.51, AAV3.1/hu.6, AAV3.1/hu.9, AAV3-9/rh.52, AAV3-11/rh.53, AAV4-8/r11.64, AAV4-9/rh.54, AAV4-19/rh.55, AAV5-3/rh.57, AAV5-22/rh.58, AAV7.3/hu.7, AAV16.8/hu.10, AAV16.12/hu.11, AAV29.3/bb.1, AAV29.5/bb.2, AAV106.1/hu.37, AAV114.3/hu.40, AAV127.2/hu.41, AAV127.5/hu.42, AAV128.3/hu.44, AAV130.4/hu.48, AAV145.1/hu.53, AAV145.5/hu.54, AAV145.6/hu.55, AAV161.10/hu.60, AAV161.6/hu.61, AAV33.12/hu.17, AAV33.4/hu.15, AAV33.8/hu.16, AAV52/hu.19, AAV52.1/hu.20, AAV58.2/hu.25, AAVA3.3, AAVA3.4, AAVA3.5, AAVA3.7, AAVC1, AAVC2, AAVC5, AAVF3, AAVF5, AAVH2, AAVrh.72, AAVhu.8, AAVrh.68, AAVrh.70, AAVpi.1, AAVpi.3, AAVpi.2, AAVrh.60, AAVrh.44, AAVrh.65, AAVrh.55, AAVrh.47, AAVrh.69, AAVrh.45, AAVrh.59, AAVhu.12, AAVH6, AAVH-1/hu.1, AAVH-5/hu.3, AAVLG-10/rh.40, AAVLG-4/rh.38, AAVLG-9/hu.39, AAVN721-8/rh.43, AAVCh.5, AAVCh.5R1, AAVcy.2, AAVcy.3, AAVcy.4, AAVcy.5, AAVCy.5R1, AAVCy.5R2, AAVCy.5R3, AAVCy.5R4, AAVcy.6, AAVhu.1, AAVhu.2, AAVhu.3, AAVhu.4, AAVhu.5, AAVhu.6, AAVhu.7, AAVhu.9, AAVhu.10, AA Vhu.11, AAVhu.13, AAVhu.15, AAVhu.16, AAVhu.17, AAVhu.18, AAVhu.20, AAVhu.21, AAVhu.22, AAVhu.23.2, AAVhu.24, AAVhu.25, AAVhu.27, AAVhu.28, AAVhu.29, AAVhu.29R, AAVhu.31, AAVhu.32, AAVhu.34, AAVhu.35, AAVhu.37, AAVhu.39, AAVhu.40, AAVhu.41, AAVhu.42, AAVhu.43, AAVhu.44, AAVhu.44R1, AAVhu.44R2, AAVhu.44R3, AAVhu.45, AAVhu.46, AAVhu.47, AAVhu.48, AAVhu.48R1, AAVhu.48R2, AAVhu.48R3, AAVhu.49, AAVhu.51, AAVhu.52, AAVhu.54, AAVhu.55, AAVhu.56, AAVhu.57, AAVhu.58, AAVhu.60, AAVhu.61, AAVhu.63, AAVhu.64, AAVhu.66, AAVhu.67, AAVhu.14/9, AAVhu.t 19, AAVrh.2, AAVrh.2R, AAVrh.8, AAVrh.8R, AAVrh.10, AAVrh.12, AAVrh.13, AAVrh.13R, AAVrh.14, AAVrh.17, AAVrh.18, AAVrh.19, AAVrh.20, AAVrh.21, AAVrh.22, AAVrh.23, AAVrh.24, AAVrh.25, AAVrh.31, AAVrh.32, AAVrh.33, AAVrh.34, AAVrh.35, AAVrh.36, AAVrh.37, AAVrh.37R2, AAVrh.38, AAVrh.39, AAVrh.40, AA Vrh.46, AAVrh.48, AAVrh.48.1, AAVrh.48.1.2, AAVrh.48.2, AAVrh.49, AAVrh.51, AAVrh.52, AAVrh.53, AAVrh.54, AAVrh.56, AAVrh.57, AAVrh.58, AAVrh.61, AAVrh.64, AAVrh.64R1, AAVrh.64R2, AAVrh.67, AAVrh.73, AAVrh.74, AAVrh8R, AAVrh8R A586R mutant, AAVrh8R R533A mutant, AAAV, BAAV, caprine AAV, bovine AAV, AAVhE1.1, AAVhEr1.5, AAVhER1.14, AAVhEr1.8, AAVhEr1.16, AAVhEr1.18, AAVhEr1.35, AAVhEr1.7, AAVhEr1.36, AAVhEr2.29, AAVhEr2.4, AAVhEr2.16, AAVhEr2.30, AAVhEr2.31, AAVhEr2.36, AAVhER1.23, AAVhEr3.1, AAV2.5T, AAV-PAEC, AAV-LK01, AAV-LK02, AAV-LK03, AAV-LK04, AAV-LK05, AAV-LK06, AAV-LK07, AAV-LK08, AAV-LK09, AAV-LK10, AAV-LK11, AAV-LK12, AAV-LK13, AAV-LK14, AAV-LK15, AAV-LK16, AAV-LK17, AAV-LK18, AAV-LK19, AAV-PAEC2, AAV-PAEC4, AAV-PAEC6, AAV-PAEC7, AAV-PAEC8, AAV-PAEC11, AAV-PAEC12, AAV-2-pre-miRNA-101, AAV-8h, AAV-8b, AAV-h, AAV-b, AAV SM 10-2, AAV Shuffle 100-1, AAV Shuffle 100-3, AAV Shuffle 100-7, AAV Shuffle 10-2, AAV Shuffle 10-6, AAV Shuffle 10-8, AAV Shuffle 100-2, AAV SM 10-1, AAV SM 10-8, AAV SM 100-3, AAV SM 100-10, BNP61 AAV, BNP62 AAV, BNP63 AAV, AAVrh.50, AAVrh.43, AAVrh.62, AAVrh.48, AAVhu.19, AAVhu.11, AAVhu.53, AAV4-8/rh.64, AAVLG-9/hu.39, AAV54.5/hu.23, AAV54.2/hu.22, AAV54.7/hu.24, AAV54.1/hu.21, AAV54.4R/hu.27, AAV46.2/hu.28, AAV46.6/hu.29, AAV128.1/hu.43, true type AAV (ttAAV), UPENN AAV 10, Japanese AAV 10 serotypes, AAV CBr-7.1, AAV CBr-7.10, AAV CBr-7.2, AAV CBr-7.3, AAV CBr-7.4, AAV CBr-7.5, AAV CBr-7.7, AAV CBr-7.8, AAV CBr-B7.3, AAV CBr-B7.4, AAV CBr-E1, AAV CBr-E2, AAV CBr-E3, AAV CBr-E4, AAV CBr-E5, AAV CBr-e5, AAV CBr-E6, AAV CBr-E7, AAV CBr-E8, AAV CHt-1, AAV CHt-2, AAV CHt-3, AAV CHt-6.1, AAV CHt-6.10, AAV CHt-6.5, AAV CHt-6.6, AAV CHt-6.7, AAV CHt-6.8, AAV CHt-P1, AAV CHt-P2, AAV CHt-P5, AAV CHt-P6, AAV CHt-P8, AAV CHt-P9, AAV CKd-1, AAV CKd-10, AAV CKd-2, AAV CKd-3, AAV CKd-4, AAV CKd-6, AAV CKd-7, AAV CKd-8, AAV CKd-B1, AAV CKd-B2, AAV CKd-B3, AAV CKd-B4, AAV CKd-B5, AAV CKd-B6, AAV CKd-B7, AAV CKd-B8, AAV CKd-H1, AAV CKd-H2, AAV CKd-H3, AAV CKd-H4, AAV CKd-H5, AAV CKd-H6, AAV CKd-N3, AAV CKd-N4, AAV CKd-N9, AAV CLg-F1, AAV CLg-F2, AAV CLg-F3, AAV CLg-F4, AAV CLg-F5, AAV CLg-F6, AAV CLg-F7, AAV CLg-F8, AAV CLv-1, AAV CLv1-1, AAV Clv1-10, AAV CLv1-2, AAV CLv-12, AAV CLv1-3, AAV CLv-13, AAV CLv1-4, AAV Clv1-7, AAV Clv1-8, AAV Clv1-9, AAV CLv-2, AAV CLv-3, AAV CLv-4, AAV CLv-6, AAV CLv-8, AAV CLv-D1, AAV CLv-D2, AAV CLv-D3, AAV CLv-D4, AAV CLv-D5, AAV CLv-D6, AAV CLv-D7, AAV CLv-D8, AAV CLv-E1, AAV CLv-K1, AAV CLv-K3, AAV CLv-K6, AAV CLv-L4, AAV CLv-L5, AAV CLv-L6, AAV CLv-M1, AAV CLv-M11, AAV CLv-M2, AAV CLv-M5, AAV CLv-M6, AAV CLv-M7, AAV CLv-M8, AAV CLv-M9, AAV CLv-R1, AAV CLv-R2, AAV CLv-R3, AAV CLv-R4, AAV CLv-R5, AAV CLv-R6, AAV CLv-R7, AAV CLv-R8, AAV CLv-R9, AAV CSp-1, AAV CSp-10, AAV CSp-11, AAV CSp-2, AAV CSp-3, AAV CSp-4, AAV CSp-6, AAV CSp-7, AAV CSp-8, AAV CSp-8.10, AAV CSp-8.2, AAV CSp-8.4, AAV CSp-8.5, AAV CSp-8.6, AAV CSp-8.7, AAV CSp-8.8, AAV CSp-8.9, AAV CSp-9, AAV.hu.48R3, AAV.VR-355, AAV3B, AAV4, AAV5, AAVF1/HSC1, AAVF11/HSC11, AAVF12/HSC12, AAVF13/HSC13, AAVF14/HSC14, AAVF15/HSC15, AAVF16/HSC16, AAVF17/HSC17, AAVF2/HSC2, AAVF3/HSC3, AAVF4/HSC4, AAVF5/HSC5, AAVF6/HSC6, AAVF7/HSC7, AAVF8/HSC8, and/or AAVF9/HSC9 and variants thereof.

[0111] In some embodiments, the serotype may be AAVDJ or a variant thereof, such as AAVDJ8 (or AAV-DJ8), as described by Grimm et al. (Journal of Virology 82(12): 5887-5911 (2008), US Publication US20140359799 and U.S. Pat. No. 7,588,772, each of which is herein incorporated by reference in its entirety). The amino acid sequence of AAVDJ8 may comprise two or more mutations in order to remove the heparin binding domain (HBD). As a non-limiting example, the AAV-DJ sequence is as described by SEQ ID NO: 1 in U.S. Pat. No. 7,588,772, the contents of which are herein incorporated by reference in their entirety, and the AAVDJ8 sequence may comprise two mutations: (1) R587Q where arginine (R; Arg) at amino acid 587 is changed to glutamine (Q; Gln) and (2) R590T where arginine (R; Arg) at amino acid 590 is changed to threonine (T; Thr). As another non-limiting example, the AAVDJ8 sequence may comprise three mutations: (1) K406R where lysine (K; Lys) at amino acid 406 is changed to arginine (R; Arg), (2) R587Q where arginine (R; Arg) at amino acid 587 is changed to glutamine (Q; Gln) and (3) R590T where arginine (R; Arg) at amino acid 590 is changed to threonine (T; Thr).

[0112] In one embodiment, the parent AAV capsid sequence comprises an AAV9 sequence.

[0113] In one embodiment, the parent AAV capsid sequence comprises an K449R AAV9 sequence.

[0114] In one embodiment, the parent AAV capsid sequence comprises an AAVDJ sequence.

[0115] In one embodiment, the parent AAV capsid sequence comprises an AAVDJ8 sequence.

[0116] In one embodiment, the parent AAV capsid sequence comprises an AAVrh10 sequence.

[0117] In one embodiment, the parent AAV capsid sequence comprises an AAV1 sequence.

[0118] In one embodiment, the parent AAV capsid sequence comprises an AAV5 sequence.

[0119] While not wishing to be bound by theory, it is understood that a parent AAV capsid sequence comprises a VP1 region. In one embodiment, a parent AAV capsid sequence comprises a VP1, VP2 and/or VP3 region, or any combination thereof. A parent VP1 sequence may be considered synonymous with a parent AAV capsid sequence.

[0120] The present disclosure refers to structural capsid proteins (including VP1, VP2 and VP3) which are encoded by capsid (Cap) genes. These capsid proteins form an outer protein structural shell (i.e. capsid) of a viral vector such as AAV. VP capsid proteins synthesized from Cap polynucleotides generally include a methionine as the first amino acid in the peptide sequence (Met1), which is associated with the start codon (AUG or ATG) in the corresponding Cap nucleotide sequence. However, it is common for a first-methionine (Met1) residue or generally any first amino acid (AA1) to be cleaved off after or during polypeptide synthesis by protein processing enzymes such as Met-aminopeptidases. This “Met/AA-clipping” process often correlates with a corresponding acetylation of the second amino acid in the polypeptide sequence (e.g., alanine, valine, serine, threonine, etc.). Met-clipping commonly occurs with VP1 and VP3 capsid proteins but can also occur with VP2 capsid proteins.

[0121] Where the Met/AA-clipping is incomplete, a mixture of one or more (one, two or three) VP capsid proteins comprising the viral capsid may be produced, some of which may include a Met1/AA1 amino acid (Met+/AA+) and some of which may lack a Met1/AA1 amino acid as a result of Met/AA-clipping (Met−/AA−). For further discussion regarding Met/AA-clipping in capsid proteins, see Jin, et al. Direct Liquid Chromatography/Mass Spectrometry Analysis for Complete Characterization of Recombinant Adeno-Associated Virus Capsid Proteins. Hum Gene Ther Methods. 2017 Oct. 28(5):255-267; Hwang, et al. N-Terminal Acetylation of Cellular Proteins Creates Specific Degradation Signals. Science. 2010 Feb. 19. 327(5968):973-977; the contents of which are each incorporated herein by reference in its entirety.

[0122] According to the present disclosure, references to capsid proteins is not limited to either clipped (Met−/AA−) or unclipped (Met+/AA+) and may, in context, refer to independent capsid proteins, viral capsids comprised of a mixture of capsid proteins, and/or polynucleotide sequences (or fragments thereof) which encode, describe, produce or result in capsid proteins of the present disclosure. A direct reference to a “capsid protein” or “capsid polypeptide” (such as VP1, VP2 or VP2) may also comprise VP capsid proteins which include a Met1/AA1 amino acid (Met+/AA+) as well as corresponding VP capsid proteins which lack the Met1/AA1 amino acid as a result of Met/AA-clipping (Met−/AA−).

[0123] Further according to the present disclosure, a reference to a specific SEQ ID NO: (whether a protein or nucleic acid) which comprises or encodes, respectively, one or more capsid proteins which include a Met1/AA1 amino acid (Met+/AA+) should be understood to teach the VP capsid proteins which lack the Met1/AA1 amino acid as upon review of the sequence, it is readily apparent any sequence which merely lacks the first listed amino acid (whether or not Met1/AA1).

[0124] As a non-limiting example, reference to a VP1 polypeptide sequence which is 736 amino acids in length and which includes a “Met1” amino acid (Met+) encoded by the AUG/ATG start codon may also be understood to teach a VP1 polypeptide sequence which is 735 amino acids in length and which does not include the “Met1” amino acid (Met−) of the 736 amino acid Met+ sequence. As a second non-limiting example, reference to a VP1 polypeptide sequence which is 736 amino acids in length and which includes an “AA1” amino acid (AA1+) encoded by any NNN initiator codon may also be understood to teach a VP1 polypeptide sequence which is 735 amino acids in length and which does not include the “AA1” amino acid (AA1−) of the 736 amino acid AA1+ sequence.

[0125] References to viral capsids formed from VP capsid proteins (such as reference to specific AAV capsid serotypes), can incorporate VP capsid proteins which include a Met1/AA1 amino acid (Met+/AA1+), corresponding VP capsid proteins which lack the Met1/AA1 amino acid as a result of Met/AA1-clipping (Met−/AA1−), and combinations thereof (Met+/AA1+ and Met−/AA1−).

[0126] As a non-limiting example, an AAV capsid serotype can include VP1 (Met+/AA1+), VP1 (Met−/AA1−), or a combination of VP1 (Met+/AA1+) and VP1 (Met−/AA1−). An AAV capsid serotype can also include VP3 (Met+/AA1+), VP3 (Met−/AA1−), or a combination of VP3 (Met+/AA1+) and VP3 (Met−/AA1−); and can also include similar optional combinations of VP2 (Met+/AA1) and VP2 (Met−/AA1−).

[0127] In one embodiment, the parent AAV capsid sequence may comprise an amino acid sequence with 50%, 51%, 52%, 53%, 54%, 55%, 56%, 57%, 58%, 59%, 60%, 61%, 62%, 63%, 64%, 65%, 66%, 67%, 68%, 69%, 70%, 71%, 72%, 73%, 74%, 75%, 76%, 77%, 78%, 79%, 80%, 81%, 82%, 83%, 84%, 85%, 86%, 87%, 88%, 89%, 90%, 91%, 92%, 93%, 94%, 95%, 96%, 97%, 98%, 99%, or 100% identity to any of the those described above.

[0128] In one embodiment, the parent AAV capsid sequence may be encoded by a nucleotide sequence with 50%, 51%, 52%, 53%, 54%, 55%, 56%, 57%, 58%, 59%, 60%, 61%, 62%, 63%, 64%, 65%, 66%, 67%, 68%, 69%, 70%, 71%, 72%, 73%, 74%, 75%, 76%, 77%, 78%, 79%, 80%, 81%, 82%, 83%, 84%, 85%, 86%, 87%, 88%, 89%, 90%, 91%, 92%, 93%, 94%, 95%, 96%, 97%, 98%, 99%, or 100% identity to any of those described above.

[0129] In one embodiment, the parent sequence is not an AAV capsid sequence and is instead a different vector (e.g., lentivirus, plasmid, etc.). In another embodiment, the parent sequence is a delivery vehicle (e.g., a nanoparticle) and the targeting peptide is attached thereto.

### Targeting Peptides

[0130] Disclosed herein are targeting peptides and associated AAV particles comprising a capsid protein with one or more targeting peptide inserts, for enhanced or improved transduction of a target tissue (e.g., cells of the CNS or PNS).

[0131] In one embodiment, the targeting peptide may direct an AAV particle to a cell or tissue of the CNS. The cell of the CNS may be, but is not limited to, neurons (e.g., excitatory, inhibitory, motor, sensory, autonomic, sympathetic, parasympathetic, Purkinje, Betz, etc.), glial cells (e.g., microglia, astrocytes, oligodendrocytes) and/or supporting cells of the brain such as immune cells (e.g., T cells). The tissue of the CNS may be, but is not limited to, the cortex (e.g., frontal, parietal, occipital, temporal), thalamus, hypothalamus, striatum, putamen, caudate nucleus, hippocampus, entorhinal cortex, basal ganglia, or deep cerebellar nuclei.

[0132] In one embodiment, the targeting peptide may direct an AAV particle to a cell or tissue of the PNS. The cell or tissue of the PNS may be, but is not limited to, a dorsal root ganglion (DRG).

[0133] The targeting peptide may direct an AAV particle to the CNS (e.g., the cortex) after intravenous administration.

[0134] The targeting peptide may direct and AAV particle to the PNS (e.g., DRG) after intravenous administration.

[0135] A targeting peptide may vary in length. In one embodiment, the targeting peptide is 3-20 amino acids in length. As non-limiting examples, the targeting peptide may be 3, 4, 5, 6, 7, 8, 9, 10, 11, 12, 13, 14, 15, 16, 17, 18, 19, 20 or 3-5, 3-8, 3-10, 3-12, 3-15, 3-18, 3-20, 5-10, 5-15, 5-20, 10-12, 10-15, 10-20, 12-20, or 15-20 amino acids in length.

[0136] Targeting peptides of the present disclosure may be identified and/or designed by any method known in the art. As a non-limiting example, the CREATE system as described in Deverman et al., (Nature Biotechnology 34(2):204-209 (2016)), Chan et al., (Nature Neuroscience 20(8):1172-1179 (2017)), and in International Patent Application Publication Nos. WO2015038958 and WO2017100671, the contents of each of which are herein incorporated by reference in their entirety, may be used as a means of identifying targeting peptides, in either mice or other research animals, such as, but not limited to, non-human primates.

[0137] Targeting peptides and associated AAV particles may be identified from libraries of AAV capsids comprised of targeting peptide variants. In one embodiment, the targeting peptides may be 7 amino acid sequences (7-mers). In another embodiment, the targeting peptides may be 9 amino acid sequences (9-mers). The targeting peptides may also differ in their method of creation or design, with non-limiting examples including, random peptide selection, site saturation mutagenesis, and/or optimization of a particular region of the peptide (e.g., flanking regions or central core).

[0138] In one embodiment, a targeting peptide library comprises targeting peptides of 7 amino acids (7-mer) in length randomly generated by PCR.

[0139] In one embodiment, a targeting peptide library comprises targeting peptides with 3 mutated amino acids. In one embodiment, these 3 mutated amino acids are consecutive amino acids. In another embodiment, these 3 mutated amino acids are not consecutive amino acids. In one embodiment, the parent targeting peptide is a 7-mer. In another embodiment, the parent peptide is a 9-mer.

[0140] In one embodiment, a targeting peptide library comprises 7-mer targeting peptides, wherein the amino acids of the targeting peptide and/or the flanking sequences are evolved through site saturation mutagenesis of 3 consecutive amino acids. In one embodiment, NNK (N=any base; K=G or T) codons are used to generate the site saturated mutation sequences.

[0141] AAV particles comprising capsid proteins with targeting peptide inserts are generated and viral genomes encoding a reporter (e.g., GFP) encapsulated within. These AAV particles (or AAV capsid library) are then administered to a transgenic mouse by intravenous delivery to the tail vein. Administration of these capsid libraries to cre-expressing mice results in expression of the reporter payload in the target tissue, due to the expression of Cre.

[0142] AAV particles and/or viral genomes may be recovered from the target tissue for identification of targeting peptides and associated AAV particles that are enriched, indicating enhanced transduction of target tissue. Standard methods in the art, such as, but not limited to next generation sequencing (NGS), viral genome quantification, biochemical assays, immunohistochemistry and/or imaging of target tissue samples may be used to determine enrichment.

[0143] A target tissue may be any cell, tissue or organ of a subject. As non-limiting examples, samples may be collected from brain, spinal cord, dorsal root ganglia and associated roots, liver, heart, gastrocnemius muscle, soleus muscle, pancreas, kidney, spleen, lung, adrenal glands, stomach, sciatic nerve, saphenous nerve, thyroid gland, eyes (with or without optic nerve), pituitary gland, skeletal muscle (rectus femoris), colon, duodenum, ileum, jejunum, skin of the leg, superior cervical ganglia, urinary bladder, ovaries, uterus, prostate gland, testes, and/or any sites identified as having a lesion, or being of interest.

### Targeting Peptide Sequences

[0144] In one embodiment the targeting peptide may comprise a sequence as set forth in Table 2. In Table 2, “_1” refers to NNM codons where A or C is in the third position and “_2” refers to NNK codons where G or T is in the third position. Additionally, the NNM codons cannot cover the entire repertoire of amino acids since Met or Trp can only be encoded by codons ATG and TGG, respectively. Therefore, some “NNM” sequences also contain some codons ending in G.

TABLE 2
Peptides

| Peptide | SEQ | Peptide | SEQ |
|---|---|---|---|
| Sequence_ID | ID NO: | Sequence_ID | ID NO: |
| AQAGAGSER_1 | 194 | DGTGQVTGW_1 | 68 |
| AQAGAGSER_2 | 194 | DGTGQVTGW_2 | 68 |
| AQDQNPGRW_1 | 195 | DGTGRLTGW_1 | 159 |
| AQDQNPGRW_2 | 195 | DGTGRLTGW_2 | 159 |
| AQELTRPFL_1 | 144 | DGTGRTVGW_1 | 117 |
| AQELTRPFL_2 | 144 | DGTGRTVGW_2 | 117 |
| AQEVPGYRW_1 | 196 | DGTGSGMMT_1 | 306 |
| AQEVPGYRW_2 | 196 | DGTGSGMMT_2 | 306 |
| AQFPTNYDS_1 | 66 | DGTGSISGW_1 | 307 |
| AQFPTNYDS_2 | 66 | DGTGSISGW_2 | 307 |
| AQFVVGQQY_1 | 95 | DGTGSLAGW_1 | 308 |
| AQFVVGQQY_2 | 95 | DGTGSLAGW_2 | 308 |
| AQGASPGRW_1 | 149 | DGTGSLNGW_1 | 309 |
| AQGASPGRW_2 | 149 | DGTGSLNGW_2 | 309 |
| AQGENPGRW_1 | 96 | DGTGSLQGW_1 | 310 |
| AQGENPGRW_2 | 96 | DGTGSLQGW_2 | 310 |
| AQGGNPGRW_1 | 91 | DGTGSLSGW_1 | 311 |
| AQGGNPGRW_2 | 91 | DGTGSLSGW_2 | 311 |
| AQGGSTGSN_1 | 197 | DGTGSLVGW_1 | 312 |
| AQGGSTGSN_2 | 197 | DGTGSLVGW_2 | 312 |
| AQGPTRPFL_1 | 125 | DGTGSTHGW_1 | 119 |
| AQGPTRPFL_2 | 125 | DGTGSTHGW_2 | 119 |
| AQGRDGWAA_1 | 198 | DGTGSTKGW_1 | 313 |
| AQGRDGWAA_2 | 198 | DGTGSTKGW_2 | 313 |
| AQGRMTDSQ_1 | 199 | DGTGSTMGW_1 | 314 |
| AQGRMTDSQ_2 | 199 | DGTGSTMGW_2 | 314 |
| AQGSDVGRW_1 | 128 | DGTGSTQGW_1 | 315 |
| AQGSDVGRW_2 | 128 | DGTGSTQGW_2 | 315 |
| AQGSNPGRW_1 | 103 | DGTGSTSGW_1 | 316 |
| AQGSNPGRW_2 | 103 | DGTGSTSGW_2 | 316 |
| AQGSNSPQV_1 | 200 | DGTGSTTGW_1 | 134 |
| AQGSNSPQV_2 | 200 | DGTGSTTGW_2 | 134 |
| AQGSWNPPA_1 | 80 | DGTGSVMGW_1 | 317 |
| AQGSWNPPA_2 | 80 | DGTGSVMGW_2 | 317 |
| AQGTWNPPA_1 | 82 | DGTGSVTGW_1 | 318 |
| AQGTWNPPA_2 | 82 | DGTGSVTGW_2 | 318 |
| AQGVFIPPK_1 | 201 | DGTGTLAGW_1 | 319 |
| AQGVFIPPK_2 | 201 | DGTGTLAGW_2 | 319 |
| AQHVNASQS_1 | 202 | DGTGTLHGW_1 | 320 |
| AQHVNASQS_2 | 202 | DGTGTLHGW_2 | 320 |
| AQIKAGWAQ_1 | 203 | DGTGTLKGW_1 | 321 |
| AQIKAGWAQ_2 | 203 | DGTGTLKGW_2 | 321 |
| AQIMSGYAQ_1 | 204 | DGTGTLSGW_1 | 322 |
| AQIMSGYAQ_2 | 204 | DGTGTLSGW_2 | 322 |
| AQKSVGSVY_1 | 205 | DGTGTTLGW_1 | 323 |
| AQKSVGSVY_2 | 205 | DGTGTTLGW_2 | 323 |
| AQLEHGFAQ_1 | 206 | DGTGTTMGW_1 | 324 |
| AQLEHGFAQ_2 | 206 | DGTGTTMGW_2 | 324 |
| AQLGGVLSA_1 | 207 | DGTGTTTGW_1 | 130 |
| AQLGGVLSA_2 | 207 | DGTGTTTGW_2 | 130 |
| AQLGLSQGR_1 | 208 | DGTGTTVGW_1 | 74 |
| AQLGLSQGR_2 | 208 | DGTGTTVGW_2 | 74 |
| AQLGYGFAQ_1 | 209 | DGTGTTYGW_1 | 325 |
| AQLGYGFAQ_2 | 209 | DGTGTTYGW_2 | 325 |
| AQLKYGLAQ_1 | 115 | DGTGTVHGW_1 | 326 |
| AQLKYGLAQ_2 | 115 | DGTGTVHGW_2 | 326 |
| AQLRIGFAQ_1 | 210 | DGTGTVQGW_1 | 327 |
| AQLRIGFAQ_2 | 210 | DGTGTVQGW_2 | 327 |
| AQLRMGYSQ_1 | 211 | DGTGTVSGW_1 | 328 |
| AQLRMGYSQ_2 | 211 | DGTGTVSGW_2 | 328 |
| AQLRQGYAQ_1 | 212 | DGTGTVTGW_1 | 329 |
| AQLRQGYAQ_2 | 212 | DGTGTVTGW_2 | 329 |
| AQLRVGFAQ_1 | 123 | DGTHARLSS_1 | 330 |
| AQLRVGFAQ_2 | 123 | DGTHARLSS_2 | 330 |
| AQLSCRSQM_1 | 213 | DGTHAYMAS_1 | 153 |
| AQLSCRSQM_2 | 213 | DGTHAYMAS_2 | 153 |
| AQLTYSQSL_1 | 214 | DGTHFAPPR_1 | 112 |
| AQLTYSQSL_2 | 214 | DGTHFAPPR_2 | 112 |
| AQLYKGYSQ_1 | 215 | DGTHIHLSS_1 | 162 |
| AQLYKGYSQ_2 | 215 | DGTHIHLSS_2 | 162 |
| AQMPQRPFL_1 | 216 | DGTHIRALS_1 | 331 |
| AQMPQRPFL_2 | 216 | DGTHIRALS_2 | 331 |
| AQNGNPGRW_1 | 84 | DGTHIRLAS_1 | 332 |
| AQNGNPGRW_2 | 84 | DGTHIRLAS_2 | 332 |
| AQPEGSARW_1 | 60 | DGTHLQPFR_1 | 333 |
| AQPEGSARW_2 | 60 | DGTHLQPFR_2 | 333 |
| AQPLAVYGA_1 | 217 | DGTHSFYDA_1 | 334 |
| AQPLAVYGA_2 | 217 | DGTHSFYDA_2 | 334 |
| AQPQSSSMS_1 | 218 | DGTHSTTGW_1 | 145 |
| AQPQSSSMS_2 | 218 | DGTHSTTGW_2 | 145 |
| AQPSVGGYW_1 | 219 | DGTHTRTGW_1 | 90 |
| AQPSVGGYW_2 | 219 | DGTHTRTGW_2 | 90 |
| AQQAVGQSW_1 | 220 | DGTHVRALS_1 | 335 |
| AQQAVGQSW_2 | 220 | DGTHVRALS_2 | 335 |
| AQQRSLASG_1 | 221 | DGTHVYMAS_1 | 336 |
| AQQRSLASG_2 | 221 | DGTHVYMAS_2 | 336 |
| AQQVMNSQG_1 | 222 | DGTHVYMSS_1 | 337 |
| AQQVMNSQG_2 | 222 | DGTHVYMSS_2 | 337 |
| AQRGVGLSQ_1 | 223 | DGTIALPFK_1 | 338 |
| AQRGVGLSQ_2 | 223 | DGTIALPFK_2 | 338 |
| AQRHDAEGS_1 | 224 | DGTIALPFR_1 | 339 |
| AQRHDAEGS_2 | 224 | DGTIALPFR_2 | 339 |
| AQRKGEPHY_1 | 225 | DGTIATRYV_1 | 340 |
| AQRKGEPHY_2 | 225 | DGTIATRYV_2 | 340 |
| AQRYTGDSS_1 | 138 | DGTIERPFR_1 | 87 |
| AQRYTGDSS_2 | 138 | DGTIERPFR_2 | 87 |
| AQSAMAAKG_1 | 226 | DGTIGYAYV_1 | 341 |
| AQSAMAAKG_2 | 226 | DGTIGYAYV_2 | 341 |
| AQSGGLTGS_1 | 227 | DGTIQAPFK_1 | 342 |
| AQSGGLTGS_2 | 227 | DGTIQAPFK_2 | 342 |
| AQSGGVGQV_1 | 228 | DGTIRLPFK_1 | 343 |
| AQSGGVGQV_2 | 228 | DGTIRLPFK_2 | 343 |
| AQSLATPFR_1 | 169 | DGTISKEVG_1 | 344 |
| AQSLATPFR_2 | 169 | DGTISKEVG_2 | 344 |
| AQSMSRPFL_1 | 229 | DGTISQPFK_1 | 105 |
| AQSMSRPFL_2 | 229 | DGTISQPFK_2 | 105 |
| AQSQLRPFL_1 | 230 | DGTKIQLSS_1 | 146 |
| AQSQLRPFL_2 | 230 | DGTKIQLSS_2 | 146 |
| AQSVAKPFL_1 | 231 | DGTKIRLSS_1 | 111 |
| AQSVAKPFL_2 | 231 | DGTKIRLSS_2 | 111 |
| AQSVSQPFR_1 | 232 | DGTKLMLSS_1 | 157 |
| AQSVSQPFR_2 | 232 | DGTKLMLSS_2 | 157 |
| AQSVVRPFL_1 | 233 | DGTKLRLSS_1 | 118 |
| AQSVVRPFL_2 | 233 | DGTKLRLSS_2 | 118 |
| AQTALSSST_1 | 234 | DGTKMVLQL_1 | 142 |
| AQTALSSST_2 | 234 | DGTKMVLQL_2 | 142 |
| AQTEMGGRC_1 | 235 | DGTKSLVQL_1 | 345 |
| AQTEMGGRC_2 | 235 | DGTKSLVQL_2 | 345 |
| AQTGFAPPR_1 | 161 | DGTKVLVQL_1 | 122 |
| AQTGFAPPR_2 | 161 | DGTKVLVQL_2 | 122 |
| AQTIRGYSS_1 | 236 | DGTLAAPFK_1 | 120 |
| AQTIRGYSS_2 | 236 | DGTLAAPFK_2 | 120 |
| AQTISNYHT_1 | 237 | DGTLAVNFK_1 | 346 |
| AQTISNYHT_2 | 237 | DGTLAVNFK_2 | 346 |
| AQTLARPFV_1 | 98 | DGTLAVPFK_1 | 71 |
| AQTLARPFV_2 | 98 | DGTLAVPFK_2 | 71 |
| AQTLAVPFK_1 | 168 | DGTLAYPFK_1 | 347 |
| AQTLAVPFK_2 | 168 | DGTLAYPFK_2 | 347 |
| AQTPDRPWL_1 | 238 | DGTLERPFR_1 | 156 |
| AQTPDRPWL_2 | 238 | DGTLERPFR_2 | 156 |
| AQTRAGYAQ_1 | 126 | DGTLEVHFK_1 | 348 |
| AQTRAGYAQ_2 | 126 | DGTLEVHFK_2 | 348 |
| AQTRAGYSQ_1 | 141 | DGTLLRLSS_1 | 121 |
| AQTRAGYSQ_2 | 141 | DGTLLRLSS_2 | 121 |
| AQTREYLLG_1 | 93 | DGTLNNPFR_1 | 109 |
| AQTREYLLG_2 | 93 | DGTLNNPFR_2 | 109 |
| AQTSAKPFL_1 | 163 | DGTLQQPFR_1 | 89 |
| AQTSAKPFL_2 | 163 | DGTLQQPFR_2 | 89 |
| AQTSARPFL_1 | 100 | DGTLSQPFR_1 | 65 |
| AQTSARPFL_2 | 100 | DGTLSQPFR_2 | 65 |
| AQTTDRPFL_1 | 85 | DGTLSRTLW_1 | 349 |
| AQTTDRPFL_2 | 85 | DGTLSRTLW_2 | 349 |
| AQTTEKPWL_1 | 83 | DGTLSSPFR_1 | 350 |
| AQTTEKPWL_2 | 83 | DGTLSSPFR_2 | 350 |
| AQTVARPFY_1 | 239 | DGTLTVPFR_1 | 351 |
| AQTVARPFY_2 | 239 | DGTLTVPFR_2 | 351 |
| AQTVATPFR_1 | 240 | DGTLVAPFR_1 | 352 |
| AQTVATPFR_2 | 240 | DGTLVAPFR_2 | 352 |
| AQTVTQLFK_1 | 241 | DGTMDKPFR_1 | 70 |
| AQTVTQLFK_2 | 241 | DGTMDKPFR_2 | 70 |
| AQVHVGSVY_1 | 165 | DGTMDRPFK_1 | 102 |
| AQVHVGSVY_2 | 165 | DGTMDRPFK_2 | 102 |
| AQVLAGYNM_1 | 242 | DGTMLRLSS_1 | 148 |
| AQVLAGYNM_2 | 242 | DGTMLRLSS_2 | 148 |
| AQVSEARVR_1 | 243 | DGTMQLTGW_1 | 353 |
| AQVSEARVR_2 | 243 | DGTMQLTGW_2 | 353 |
| AQVVVGYSQ_1 | 244 | DGTNGLKGW_1 | 76 |
| AQVVVGYSQ_2 | 244 | DGTNGLKGW_2 | 76 |
| AQWAAGYNV_1 | 245 | DGTNSISGW_1 | 354 |
| AQWAAGYNV_2 | 245 | DGTNSISGW_2 | 354 |
| AQWELSNGY_1 | 246 | DGTNSLSGW_1 | 355 |
| AQWELSNGY_2 | 246 | DGTNSLSGW_2 | 355 |
| AQWEVKGGY_1 | 247 | DGTNSTTGW_1 | 143 |
| AQWEVKGGY_2 | 247 | DGTNSTTGW_2 | 143 |
| AQWEVKRGY_1 | 248 | DGTNSVTGW_1 | 356 |
| AQWEVKRGY_2 | 248 | DGTNSVTGW_2 | 356 |
| AQWEVQSGF_1 | 249 | DGTNTINGW_1 | 124 |
| AQWEVQSGF_2 | 249 | DGTNTINGW_2 | 124 |
| AQWEVRGGY_1 | 250 | DGTNTLGGW_1 | 357 |
| AQWEVRGGY_2 | 250 | DGTNTLGGW_2 | 357 |
| AQWEVTSGW_1 | 251 | DGTNTTHGW_1 | 113 |
| AQWEVTSGW_2 | 251 | DGTNTTHGW_2 | 113 |
| AQWGAPSHG_1 | 252 | DGTNYRLSS_1 | 358 |
| AQWGAPSHG_2 | 252 | DGTNYRLSS_2 | 358 |
| AQWMELGSS_1 | 253 | DGTQALSGW_1 | 359 |
| AQWMELGSS_2 | 253 | DGTQALSGW_2 | 359 |
| AQWMFGGSG_1 | 254 | DGTQFRLSS_1 | 129 |
| AQWMFGGSG_2 | 254 | DGTQFRLSS_2 | 129 |
| AQWMLGGAQ_1 | 255 | DGTQFSPPR_1 | 108 |
| AQWMLGGAQ_2 | 255 | DGTQFSPPR_2 | 108 |
| AQWPTAYDA_1 | 256 | DGTQGLKGW_1 | 158 |
| AQWPTAYDA_2 | 256 | DGTQGLKGW_2 | 158 |
| AQWPTSYDA_1 | 62 | DGTQTTSGW_1 | 360 |
| AQWPTSYDA_2 | 62 | DGTQTTSGW_2 | 360 |
| AQWQVQTGF_1 | 257 | DGTRALTGW_1 | 361 |
| AQWQVQTGF_2 | 257 | DGTRALTGW_2 | 361 |
| AQWSTEGGY_1 | 258 | DGTRFSLSS_1 | 362 |
| AQWSTEGGY_2 | 258 | DGTRFSLSS_2 | 362 |
| AQWTAAGGY_1 | 259 | DGTRGLSGW_1 | 363 |
| AQWTAAGGY_2 | 259 | DGTRGLSGW_2 | 363 |
| AQWTTESGY_1 | 260 | DGTRIGLSS_1 | 364 |
| AQWTTESGY_2 | 260 | DGTRIGLSS_2 | 364 |
| AQWVYGSSH_1 | 261 | DGTRLHLAS_1 | 365 |
| AQWVYGSSH_2 | 261 | DGTRLHLAS_2 | 365 |
| AQYLAGYTV_1 | 262 | DGTRLHLSS_1 | 366 |
| AQYLAGYTV_2 | 262 | DGTRLHLSS_2 | 366 |
| AQYLKGYSV_1 | 152 | DGTRLLLSS_1 | 367 |
| AQYLKGYSV_2 | 152 | DGTRLLLSS_2 | 367 |
| AQYLSGYNT_1 | 263 | DGTRLMLSS_1 | 368 |
| AQYLSGYNT_2 | 263 | DGTRLMLSS_2 | 368 |
| DGAAATTGW_1 | 264 | DGTRLNLSS_1 | 369 |
| DGAAATTGW_2 | 264 | DGTRLNLSS_2 | 369 |
| DGAGGTSGW_1 | 151 | DGTRMVVQL_1 | 370 |
| DGAGGTSGW_2 | 151 | DGTRMVVQL_2 | 370 |
| DGAGTTSGW_1 | 265 | DGTRNMYEG_1 | 135 |
| DGAGTTSGW_2 | 265 | DGTRNMYEG_2 | 135 |
| DGAHGLSGW_1 | 266 | DGTRSITGW_1 | 371 |
| DGAHGLSGW_2 | 266 | DGTRSITGW_2 | 371 |
| DGAHVGLSS_1 | 267 | DGTRSLHGW_1 | 372 |
| DGAHVGLSS_2 | 267 | DGTRSLHGW_2 | 372 |
| DGARTVLQL_1 | 268 | DGTRSTTGW_1 | 373 |
| DGARTVLQL_2 | 268 | DGTRSTTGW_2 | 373 |
| DGEYQKPFR_1 | 269 | DGTRTTTGW_1 | 106 |
| DGEYQKPFR_2 | 269 | DGTRTTTGW_2 | 106 |
| DGGGTTTGW_1 | 270 | DGTRTVTGW_1 | 374 |
| DGGGTTTGW_2 | 270 | DGTRTVTGW_2 | 374 |
| DGHATSMGW_1 | 271 | DGTRTVVQL_1 | 375 |
| DGHATSMGW_2 | 271 | DGTRTVVQL_2 | 375 |
| DGKGSTQGW_1 | 272 | DGTRVHLSS_1 | 376 |
| DGKGSTQGW_2 | 272 | DGTRVHLSS_2 | 376 |
| DGKQYQLSS_1 | 92 | DGTSFPYAR_1 | 86 |
| DGKQYQLSS_2 | 92 | DGTSFPYAR_2 | 86 |
| DGNGGLKGW_1 | 167 | DGTSFTPPK_1 | 81 |
| DGNGGLKGW_2 | 167 | DGTSFTPPK_2 | 81 |
| DGQGGLSGW_1 | 273 | DGTSFTPPR_1 | 88 |
| DGQGGLSGW_2 | 273 | DGTSFTPPR_2 | 88 |
| DGQHFAPPR_1 | 110 | DGTSGLHGW_1 | 377 |
| DGQHFAPPR_2 | 110 | DGTSGLHGW_2 | 377 |
| DGRATKTLY_1 | 274 | DGTSGLKGW_1 | 101 |
| DGRATKTLY_2 | 274 | DGTSGLKGW_2 | 101 |
| DGRNALTGW_1 | 275 | DGTSIHLSS_1 | 378 |
| DGRNALTGW_2 | 275 | DGTSIHLSS_2 | 378 |
| DGRRQVIQL_1 | 276 | DGTSIMLSS_1 | 379 |
| DGRRQVIQL_2 | 276 | DGTSIMLSS_2 | 379 |
| DGRVYGLSS_1 | 277 | DGTSLRLSS_1 | 166 |
| DGRVYGLSS_2 | 277 | DGTSLRLSS_2 | 166 |
| DGSGRTTGW_1 | 147 | DGTSNYGAR_1 | 380 |
| DGSGRTTGW_2 | 147 | DGTSNYGAR_2 | 380 |
| DGSGTTRGW_1 | 114 | DGTSSYYDA_1 | 381 |
| DGSGTTRGW_2 | 114 | DGTSSYYDA_2 | 381 |
| DGSGTVSGW_1 | 278 | DGTSSYYDS_1 | 59 |
| DGSGTVSGW_2 | 278 | DGTSSYYDS_2 | 59 |
| DGSPEKPFR_1 | 160 | DGTSTISGW_1 | 382 |
| DGSPEKPFR_2 | 160 | DGTSTISGW_2 | 382 |
| DGSQSTTGW_1 | 136 | DGTSTITGW_1 | 383 |
| DGSQSTTGW_2 | 136 | DGTSTITGW_2 | 383 |
| DGSSFYPPK_1 | 127 | DGTSTLHGW_1 | 384 |
| DGSSFYPPK_2 | 127 | DGTSTLHGW_2 | 384 |
| DGSSSYYDA_1 | 64 | DGTSTLRGW_1 | 385 |
| DGSSSYYDA_2 | 64 | DGTSTLRGW_2 | 385 |
| DGSIERPFR_1 | 99 | DGTSTLSGW_1 | 386 |
| DGSIERPFR_2 | 99 | DGTSTLSGW_2 | 386 |
| DGTAARLSS_1 | 132 | DGTSYVPPK_1 | 97 |
| DGTAARLSS_2 | 132 | DGTSYVPPK_2 | 97 |
| DGTADKPFR_1 | 63 | DGTSYVPPR_1 | 78 |
| DGTADKPFR_2 | 63 | DGTSYVPPR_2 | 78 |
| DGTADRPFR_1 | 155 | DGTTATYYK_1 | 387 |
| DGTADRPFR_2 | 155 | DGTTATYYK_2 | 387 |
| DGTAERPFR_1 | 140 | DGTTFTPPR_1 | 79 |
| DGTAERPFR_2 | 140 | DGTTFTPPR_2 | 79 |
| DGTAIHLSS_1 | 67 | DGTTLAPFR_1 | 388 |
| DGTAIHLSS_2 | 67 | DGTTLAPFR_2 | 388 |
| DGTAIYLSS_1 | 279 | DGTTLVPPR_1 | 116 |
| DGTAIYLSS_2 | 279 | DGTTLVPPR_2 | 116 |
| DGTALMLSS_1 | 280 | DGTTSKTLW_1 | 389 |
| DGTALMLSS_2 | 280 | DGTTSKTLW_2 | 389 |
| DGTASISGW_1 | 281 | DGTTSRTLW_1 | 390 |
| DGTASISGW_2 | 281 | DGTTSRTLW_2 | 390 |
| DGTASTSGW_1 | 282 | DGTTTRSLY_1 | 391 |
| DGTASTSGW_2 | 282 | DGTTTRSLY_2 | 391 |
| DGTASVTGW_1 | 283 | DGTTTTTGW_1 | 392 |
| DGTASVTGW_2 | 283 | DGTTTTTGW_2 | 392 |
| DGTASYYDS_1 | 61 | DGTTTYGAR_1 | 77 |
| DGTASYYDS_2 | 61 | DGTTTYGAR_2 | 77 |
| DGTATTMGW_1 | 284 | DGTTWTPPR_1 | 139 |
| DGTATTMGW_2 | 284 | DGTTWTPPR_2 | 139 |
| DGTATTTGW_1 | 285 | DGTTYMLSS_1 | 393 |
| DGTATTTGW_2 | 285 | DGTTYMLSS_2 | 393 |
| DGTAYRLSS_1 | 286 | DGTTYVPPR_1 | 75 |
| DGTAYRLSS_2 | 286 | DGTTYVPPR_2 | 75 |
| DGTDKMWSL_1 | 287 | DGTVANPFR_1 | 394 |
| DGTDKMWSL_2 | 287 | DGTVANPFR_2 | 394 |
| DGTGGIKGW_1 | 131 | DGTVDRPFK_1 | 395 |
| DGTGGIKGW_2 | 131 | DGTVDRPFK_2 | 395 |
| DGTGGIMGW_1 | 288 | DGTVIHLSS_1 | 73 |
| DGTGGIMGW_2 | 288 | DGTVIHLSS_2 | 73 |
| DGTGGISGW_1 | 289 | DGTVILLSS_1 | 396 |
| DGTGGISGW_2 | 289 | DGTVILLSS_2 | 396 |
| DGTGGLAGW_1 | 290 | DGTVIMLSS_1 | 397 |
| DGTGGLAGW_2 | 290 | DGTVIMLSS_2 | 397 |
| DGTGGLHGW_1 | 291 | DGTVLHLSS_1 | 398 |
| DGTGGLHGW_2 | 291 | DGTVLHLSS_2 | 398 |
| DGTGGLQGW_1 | 292 | DGTVLMLSS_1 | 399 |
| DGTGGLQGW_2 | 292 | DGTVLMLSS_2 | 399 |
| DGTGGLRGW_1 | 154 | DGTVLVPFR_1 | 150 |
| DGTGGLRGW_2 | 154 | DGTVLVPFR_2 | 150 |
| DGTGGLSGW_1 | 293 | DGTVPYLAS_1 | 400 |
| DGTGGLSGW_2 | 293 | DGTVPYLAS_2 | 400 |
| DGTGGLTGW_1 | 294 | DGTVPYLSS_1 | 401 |
| DGTGGLTGW_2 | 294 | DGTVPYLSS_2 | 401 |
| DGTGGTKGW_1 | 107 | DGTVRVPFR_1 | 164 |
| DGTGGTKGW_2 | 107 | DGTVRVPFR_2 | 164 |
| DGTGGTSGW_1 | 295 | DGTVSMPFK_1 | 402 |
| DGTGGTSGW_2 | 295 | DGTVSMPFK_2 | 402 |
| DGTGGVHGW_1 | 296 | DGTVSNPFR_1 | 403 |
| DGTGGVHGW_2 | 296 | DGTVSNPFR_2 | 403 |
| DGTGGVMGW_1 | 297 | DGTVSTRWV_1 | 404 |
| DGTGGVMGW_2 | 297 | DGTVSTRWV_2 | 404 |
| DGTGGVSGW_1 | 298 | DGTVTTTGW_1 | 405 |
| DGTGGVSGW_2 | 298 | DGTVTTTGW_2 | 405 |
| DGTGGVTGW_1 | 299 | DGTVTVTGW_1 | 406 |
| DGTGGVTGW_2 | 299 | DGTVTVTGW_2 | 406 |
| DGTGGVYGW_1 | 300 | DGTVWVPPR_1 | 407 |
| DGTGGVYGW_2 | 300 | DGTVWVPPR_2 | 407 |
| DGTGNLQGW_1 | 301 | DGTVYRLSS_1 | 408 |
| DGTGNLQGW_2 | 301 | DGTVYRLSS_2 | 408 |
| DGTGNLRGW_1 | 133 | DGTYARLSS_1 | 409 |
| DGTGNLRGW_2 | 133 | DGTYARLSS_2 | 409 |
| DGTGNLSGW_1 | 302 | DGTYGNKLW_1 | 410 |
| DGTGNLSGW_2 | 302 | DGTYGNKLW_2 | 410 |
| DGTGNTHGW_1 | 72 | DGTYIHLSS_1 | 411 |
| DGTGNTHGW_2 | 72 | DGTYIHLSS_2 | 411 |
| DGTGNTRGW_1 | 94 | DGTYSTSGW_1 | 412 |
| DGTGNTRGW_2 | 94 | DGTYSTSGW_2 | 412 |
| DGTGNTSGW_1 | 137 | DGVHPGLSS_1 | 104 |
| DGTGNTSGW_2 | 137 | DGVHPGLSS_2 | 104 |
| DGTGNVSGW_1 | 303 | DGVVALLAS_1 | 413 |
| DGTGNVSGW_2 | 303 | DGVVALLAS_2 | 413 |
| DGTGNVTGW_1 | 69 | DGYVGVGSL_1 | 414 |
| DGTGNVTGW_2 | 69 | DGYVGVGSL_2 | 414 |
| DGTGQLVGW_1 | 304 | control | |
| | | (wtAAV9- | |
| | | NNM) | |
| DGTGQLVGW_2 | 304 | control | |
| | | (wtAAV9- | |
| | | NNK) | |
| DGTGQTIGW_1 | 305 | | |
| DGTGQTIGW_2 | 305 | | |

[0145] In one embodiment, the targeting peptide may comprise an amino acid sequence with 50%, 51%, 52%, 53%, 54%, 55%, 56%, 57%, 58%, 59%, 60%, 61%, 62%, 63%, 64%, 65%, 66%, 67%, 68%, 69%, 70%, 71%, 72%, 73%, 74%, 75%, 76%, 77%, 78%, 79%, 80%, 81%, 82%, 83%, 84%, 85%, 86%, 87%, 88%, 89%, 90%, 91%, 92%, 93%, 94%, 95%, 96%, 97%, 98%, 99%, or 100% identity to any of the sequences shown in Table 2.

[0146] In one embodiment, a targeting peptide may comprise 4 or more contiguous amino acids of any of the targeting peptides disclosed herein. In one embodiment the targeting peptide may comprise 4 contiguous amino acids of any of the sequences as set forth in Table 2. In one embodiment the targeting peptide may comprise 5 contiguous amino acids of any of the sequences as set forth in Table 2. In one embodiment the targeting peptide may comprise 6 contiguous amino acids of any of the sequences as set forth in Table 2.

[0147] In one embodiment, the AAV particle of the disclosure comprises an AAV capsid with a targeting peptide insert, wherein the targeting peptide has an amino acid sequence as set forth in any of Table 2.

[0148] In one embodiment, the AAV particle of the disclosure comprises an AAV capsid with a targeting peptide insert, wherein the targeting peptide has an amino acid sequence comprising at least 4 contiguous amino acids of any of the sequences as set forth in any of Table 2.

[0149] In one embodiment, the AAV particle of the disclosure comprises an AAV capsid with a targeting peptide insert, wherein the targeting peptide has an amino acid sequence substantially comprising any of the sequences as set forth in any of Table 2.

[0150] In one embodiment, the AAV particle of the disclosure comprises an AAV capsid polynucleotide with a targeting nucleic acid insert, wherein the targeting nucleic acid insert has a nucleotide sequence substantially comprising any of those set forth as Table 2.

[0151] The AAV particle of the disclosure comprising a targeting nucleic acid insert, may have a polynucleotide sequence with 50%, 51%, 52%, 53%, 54%, 55%, 56%, 57%, 58%, 59%, 60%, 61%, 62%, 63%, 64%, 65%, 66%, 67%, 68%, 69%, 70%, 71%, 72%, 73%, 74%, 75%, 76%, 77%, 78%, 79%, 80%, 81%, 82%, 83%, 84%, 85%, 86%, 87%, 88%, 89%, 90%, 91%, 92%, 93%, 94%, 95%, 96%, 97%, 98%, 99% or more, identity to the parent capsid sequence.

[0152] The AAV particle of the disclosure comprising a targeting peptide insert, may have an amino acid sequence with 50%, 51%, 52%, 53%, 54%, 55%, 56%, 57%, 58%, 59%, 60%, 61%, 62%, 63%, 64%, 65%, 66%, 67%, 68%, 69%, 70%, 71%, 72%, 73%, 74%, 75%, 76%, 77%, 78%, 79%, 80%, 81%, 82%, 83%, 84%, 85%, 86%, 87%, 88%, 89%, 90%, 91%, 92%, 93%, 94%, 95%, 96%, 97%, 98%, 99% or more, identity to the parent capsid sequence.

[0153] In any of the DNA and RNA sequences referenced and/or described herein, the single letter symbol has the following description: A for adenine; C for cytosine; G for guanine; T for thymine; U for Uracil; W for weak bases such as adenine or thymine; S for strong nucleotides such as cytosine and guanine; M for amino nucleotides such as adenine and cytosine; K for keto nucleotides such as guanine and thymine; R for purines adenine and guanine; Y for pyrimidine cytosine and thymine; B for any base that is not A (e.g., cytosine, guanine, and thymine); D for any base that is not C (e.g., adenine, guanine, and thymine); H for any base that is not G (e.g., adenine, cytosine, and thymine); V for any base that is not T (e.g., adenine, cytosine, and guanine); N for any nucleotide (which is not a gap); and Z is for zero.

[0154] In any of the amino acid sequences referenced and/or described herein, the single letter symbol has the following description: G (Gly) for Glycine; A (Ala) for Alanine; L (Leu) for Leucine; M (Met) for Methionine; F (Phe) for Phenylalanine; W (Trp) for Tryptophan; K (Lys) for Lysine; Q (Gln) for Glutamine; E (Glu) for Glutamic Acid; S (Ser) for Serine; P (Pro) for Proline; V (Val) for Valine; I (Ile) for Isoleucine; C (Cys) for Cysteine; Y (Tyr) for Tyrosine; H (His) for Histidine; R (Arg) for Arginine; N (Asn) for Asparagine; D (Asp) for Aspartic Acid; T (Thr) for Threonine; B (Asx) for Aspartic acid or Asparagine; J (Xle) for Leucine or Isoleucine; O (Pyl) for Pyrrolysine; U (Sec) for Selenocysteine; X (Xaa) for any amino acid; and Z (Glx) for Glutamine or Glutamic acid.

### Use of Targeting Peptides in AAV Particles

[0155] Targeting peptides may be stand-alone peptides or may be inserted into or conjugated to a parent sequence. In one embodiment, the targeting peptides are inserted into the capsid protein of an AAV particle.

[0156] One or more targeting peptides may be inserted into a parent AAV capsid sequence to generate the AAV particles of the disclosure.

[0157] Targeting peptides may be inserted into a parent AAV capsid sequence in any location that results in fully functional AAV particles. The targeting peptide may be inserted in VP1, VP2 and/or VP3. Numbering of the amino acid residues differs across AAV serotypes, and so the exact amino acid position of the targeting peptide insertion may not be critical. As used herein, amino acid positions of the parent AAV capsid sequence are described using AAV9 (SEQ ID NO: 2) as reference.

[0158] In one embodiment, the targeting peptides are inserted in a hypervariable region of the AAV capsid sequence. Non-limiting examples of such hypervariable regions include Loop IV and Loop VIII of the parent AAV capsid. While not wishing to be bound by theory, these surface exposed loops are unstructured and poorly conserved, making them ideal regions for insertion of targeting peptides.

[0159] In one embodiment, the targeting peptide is inserted into Loop IV. In another embodiment, the targeting peptide is used to replace a portion, or all of Loop IV. As a non-limiting example, addition of the targeting peptide to the parent AAV capsid sequence may result in the replacement or mutation of at least one amino acid of the parent AAV capsid.

[0160] In one embodiment, the targeting peptide is inserted into Loop VIII. In another embodiment, the targeting peptide is used to replace a portion, or all of Loop VIII. As a non-limiting example, addition of the targeting peptide to the parent AAV capsid sequence may result in the replacement or mutation of at least one amino acid of the parent AAV capsid.

[0161] In one embodiment, more than one targeting peptide is inserted into a parent AAV capsid sequence. As a non-limiting example, targeting peptides may be inserted at both Loop IV and Loop VIII in the same parent AAV capsid sequence.

[0162] Targeting peptides may be inserted at any amino acid position of the parent AAV capsid sequence, such as, but not limited to, between amino acids at positions 586-592, 588-589, 586-589, 452-458, 262-269, 464-473, 491-495, 546-557 and/or 659-668.

[0163] In a preferred embodiment, the targeting peptides are inserted into a parent AAV capsid sequence between amino acids at positions 588 and 589 (Loop VIII). In one embodiment, the parent AAV capsid is AAV9 (SEQ ID NO: 2). In a second embodiment, the parent AAV capsid is K449R AAV9 (SEQ ID NO: 3).

[0164] The targeting peptides described herein may increase the transduction of the AAV particles of the disclosure to a target tissue as compared to the parent AAV particle lacking a targeting peptide insert. In one embodiment, the targeting peptide increases the transduction of an AAV particle to a target tissue by at least about 5%, 10%, 15%, 20%, 25%, 30%, 35%, 40%, 45%, 50%, 55%, 60%, 65%, 70%, 75%, 80%, 85%, 90%, 95%, 100%, 125%, 150%, 200%, 300%, 400%, 500%, or more as compared to a parent AAV particle lacking a targeting peptide insert.

[0165] In one embodiment, the targeting peptide increases the transduction of an AAV particle to a cell or tissue of the CNS by at least about 5%, 10%, 15%, 20%, 25%, 30%, 35%, 40%, 45%, 50%, 55%, 60%, 65%, 70%, 75%, 80%, 85%, 90%, 95%, 100%, 125%, 150%, 200%, 300%, 400%, 500%, or more as compared to a parent AAV particle lacking a targeting peptide insert.

[0166] In one embodiment, the targeting peptide increases the transduction of an AAV particle to a cell or tissue of the PNS by at least about 5%, 10%, 15%, 20%, 25%, 30%, 35%, 40%, 45%, 50%, 55%, 60%, 65%, 70%, 75%, 80%, 85%, 90%, 95%, 100%, 125%, 150%, 200%, 300%, 400%, 500%, or more as compared to a parent AAV particle lacking a targeting peptide insert.

[0167] In one embodiment, the targeting peptide increases the transduction of an AAV particle to a cell or tissue of the DRG by at least about 5%, 10%, 15%, 20%, 25%, 30%, 35%, 40%, 45%, 50%, 55%, 60%, 65%, 70%, 75%, 80%, 85%, 90%, 95%, 100%, 125%, 150%, 200%, 300%, 400%, 500%, or more as compared to a parent AAV particle lacking a targeting peptide insert.

### AAV Production

[0168] Viral production disclosed herein describes processes and methods for producing AAV particles (with enhanced, improved and/or increased tropism for a target tissue) that may be used to contact a target cell to deliver a payload.

[0169] The present disclosure provides methods for the generation of AAV particles comprising targeting peptides. In one embodiment, the AAV particles are prepared by viral genome replication in a viral replication cell. Any method known in the art may be used for the preparation of AAV particles. In one embodiment, AAV particles are produced in mammalian cells (e.g., HEK293). In another embodiment, AAV particles are produced in insect cells (e.g., Sf9)

[0170] Methods of making AAV particles are well known in the art and are described in e.g., U.S. Pat. Nos. 6,204,059, 5,756,283, 6,258,595, 6,261,551, 6,270,996, 6,281,010, 6,365,394, 6,475,769, 6,482,634, 6,485,966, 6,943,019, 6,953,690, 7,022,519, 7,238,526, 7,291,498 and 7,491,508, 5,064,764, 6,194,191, 6,566,118, 8,137,948; or International Publication Nos. WO1996039530, WO1998010088, WO1999014354, WO1999015685, WO1999047691, WO2000055342, WO2000075353 and WO2001023597; Methods In Molecular Biology, ed. Richard, Humana Press, NJ (1995); O'Reilly et al., Baculovirus Expression Vectors, A Laboratory Manual, Oxford Univ. Press (1994); Samulski et al., J. Vir. 63:3822-8 (1989); Kajigaya et al., Proc. Nat'l. Acad. Sci. USA 88:4646-50 (1991); Ruffing et al., J. Vir. 66:6922-30 (1992); Kimbauer et al., Vir., 219:37-44 (1996); Zhao et al., Vir. 272:382-93 (2000); the contents of each of which are herein incorporated by reference in their entirety. In one embodiment, the AAV particles are made using the methods described in International Patent Publication WO2015191508, the contents of which are herein incorporated by reference in their entirety.

### Therapeutic Applications

[0171] The present disclosure provides a method for treating a disease, disorder and/or condition in a mammalian subject, including a human subject, comprising administering to the subject an AAV particle described herein where the AAV particle comprises the novel capsids (“TRACER AAV particles”) defined by the present disclosure or administering to the subject any of the described compositions, including pharmaceutical compositions, described herein.

[0172] In one embodiment, the TRACER AAV particles of the present disclosure are administered to a subject prophylactically, to prevent on-set of disease. In another embodiment, the TRACER AAV particles of the present disclosure are administered to treat (lessen the effects of) a disease or symptoms thereof. In yet another embodiment, the TRACER AAV particles of the present disclosure are administered to cure (eliminate) a disease. In another embodiment, the TRACER AAV particles of the present disclosure are administered to prevent or slow progression of disease. In yet another embodiment, the TRACER AAV particles of the present disclosure are used to reverse the deleterious effects of a disease. Disease status and/or progression may be determined or monitored by standard methods known in the art.

[0173] In some embodiments, the TRACER AAV particles of the disclosure are useful in the field of medicine for the treatment, prophylaxis, palliation or amelioration of neurological diseases and/or disorders.

[0174] In some embodiments, the TRACER AAV particles of the disclosure are useful in the field of medicine for the treatment, prophylaxis, palliation or amelioration of tauopathy.

[0175] In some embodiments, the TRACER AAV particles of the disclosure are useful in the field of medicine for the treatment, prophylaxis, palliation or amelioration of Alzheimer's Disease.

[0176] In some embodiments, the TRACER AAV particles of the disclosure are useful in the field of medicine for the treatment, prophylaxis, palliation or amelioration of Friedreich's ataxia, or any disease stemming from a loss or partial loss of frataxin protein.

[0177] In some embodiments, the TRACER AAV particles of the disclosure are useful in the field of medicine for the treatment, prophylaxis, palliation or amelioration of Parkinson's Disease.

[0178] In some embodiments, the TRACER AAV particles of the disclosure are useful in the field of medicine for the treatment, prophylaxis, palliation or amelioration of Amyotrophic lateral sclerosis.

[0179] In some embodiments, the TRACER AAV particles of the disclosure are useful in the field of medicine for the treatment, prophylaxis, palliation or amelioration of Huntington's Disease.

[0180] In some embodiments, the TRACER AAV particles of the disclosure are useful in the field of medicine for the treatment, prophylaxis, palliation or amelioration of chronic or neuropathic pain.

[0181] In some embodiments, the TRACER AAV particles of the disclosure are useful in the field of medicine for treatment, prophylaxis, palliation or amelioration of a disease associated with the central nervous system.

[0182] In some embodiments, the TRACER AAV particles of the disclosure are useful in the field of medicine for treatment, prophylaxis, palliation or amelioration of a disease associated with the peripheral nervous system.

[0183] In one embodiment, the TRACER AAV particles of the present disclosure are administered to a subject having at least one of the diseases or symptoms described herein.

[0184] As used herein, any disease associated with the central or peripheral nervous system and components thereof (e.g., neurons) may be considered a “neurological disease”.

[0185] Any neurological disease may be treated with the TRACER AAV particles of the disclosure, or pharmaceutical compositions thereof, including but not limited to, Absence of the Septum Pellucidum, Acid Lipase Disease, Acid Maltase Deficiency, Acquired Epileptiform Aphasia, Acute Disseminated Encephalomyelitis, Attention Deficit-Hyperactivity Disorder (ADHD), Adie's Pupil, Adie's Syndrome, Adrenoleukodystrophy, Agenesis of the Corpus Callosum, Agnosia, Aicardi Syndrome, Aicardi-Goutieres Syndrome Disorder, AIDS-Neurological Complications, Alexander Disease, Alpers' Disease, Alternating Hemiplegia, Alzheimer's Disease, Amyotrophic Lateral Sclerosis (ALS), Anencephaly, Aneurysm, Angelman Syndrome, Angiomatosis, Anoxia, Antiphospholipid Syndrome, Aphasia, Apraxia, Arachnoid Cysts, Arachnoiditis, Arnold-Chiari Malformation, Arteriovenous Malformation, Asperger Syndrome, Ataxia, Ataxia Telangiectasia, Ataxias and Cerebellar or Spinocerebellar Degeneration, Atrial Fibrillation and Stroke, Attention Deficit-Hyperactivity Disorder, Autism Spectrum Disorder, Autonomic Dysfunction, Back Pain, Barth Syndrome, Batten Disease, Becker's Myotonia, Bechet's Disease, Bell's Palsy, Benign Essential Blepharospasm, Benign Focal Amyotrophy, Benign Intracranial Hypertension, Bernhardt-Roth Syndrome, Binswanger's Disease, Blepharospasm, Bloch-Sulzberger Syndrome, Brachial Plexus Birth Injuries, Brachial Plexus Injuries, Bradbury-Eggleston Syndrome, Brain and Spinal Tumors, Brain Aneurysm, Brain Injury, Brown-Sequard Syndrome, Bulbar palsy, Bulbospinal Muscular Atrophy, Cerebral Autosomal Dominant Arteriopathy with Sub-cortical Infarcts and Leukoencephalopathy (CADASIL), Canavan Disease, Carpal Tunnel Syndrome, Causalgia, Cavernomas, Cavernous Angioma, Cavernous Malformation, Central Cervical Cord Syndrome, Central Cord Syndrome, Central Pain Syndrome, Central Pontine Myelinolysis, Cephalic Disorders, Ceramidase Deficiency, Cerebellar Degeneration, Cerebellar Hypoplasia, Cerebral Aneurysms, Cerebral Arteriosclerosis, Cerebral Atrophy, Cerebral Beriberi, Cerebral Cavernous Malformation, Cerebral Gigantism, Cerebral Hypoxia, Cerebral Palsy, Cerebro-Oculo-Facio-Skeletal Syndrome (COFS), Charcot-Marie-Tooth Disease, Chiari Malformation, Cholesterol Ester Storage Disease, Chorea, Choreoacanthocytosis, Chronic Inflammatory Demyelinating Polyneuropathy (CIDP), Chronic Orthostatic Intolerance, Chronic Pain, Cockayne Syndrome Type II, Coffin Lowry Syndrome, Colpocephaly, Coma, Complex Regional Pain Syndrome, Concentric sclerosis (Baló's sclerosis), Congenital Facial Diplegia, Congenital Myasthenia, Congenital Myopathy, Congenital Vascular Cavernous Malformations, Corticobasal Degeneration, Cranial Arteritis, Craniosynostosis, Cree encephalitis, Creutzfeldt-Jakob Disease, Chronic progressive external ophtalmoplegia, Cumulative Trauma Disorders, Cushing's Syndrome, Cytomegalic Inclusion Body Disease, Cytomegalovirus Infection, Dancing Eyes-Dancing Feet Syndrome, Dandy-Walker Syndrome, Dawson Disease, De Morsier's Syndrome, Dejerine-Klumpke Palsy, Dementia, Dementia-Multi-Infarct, Dementia-Semantic, Dementia-Subcortical, Dementia With Lewy Bodies, Demyelination diseases, Dentate Cerebellar Ataxia, Dentatorubral Atrophy, Dermatomyositis, Developmental Dyspraxia, Devic's Syndrome, Diabetic Neuropathy, Diffuse Sclerosis, Distal hereditary motor neuronopathies, Dravet Syndrome, Dysautonomia, Dysgraphia, Dyslexia, Dysphagia, Dyspraxia, Dyssynergia Cerebellaris Myoclonica, Dyssynergia Cerebellaris Progressiva, Dystonias, Early Infantile Epileptic Encephalopathy, Empty Sella Syndrome, Encephalitis, Encephalitis Lethargica, Encephaloceles, Encephalomyelitis, Encephalopathy, Encephalopathy (familial infantile), Encephalotrigeminal Angiomatosis, Epilepsy, Epileptic Hemiplegia, Episodic ataxia, Erb's Palsy, Erb-Duchenne and Dejerine-Klumpke Palsies, Essential Tremor, Extrapontine Myelinolysis, Faber's disease, Fabry Disease, Fahr's Syndrome, Fainting, Familial Dysautonomia, Familial Hemangioma, Familial Idiopathic Basal Ganglia Calcification, Familial Periodic Paralyses, Familial Spastic Paralysis, Farber's Disease, Febrile Seizures, Fibromuscular Dysplasia, Fisher Syndrome, Floppy Infant Syndrome, Foot Drop, Friedreich's Ataxia, Frontotemporal Dementia, Gaucher Disease, Generalized Gangliosidoses (GM1, GM2), Gerstmann's Syndrome, Gerstmann-Straussler-Scheinker Disease, Giant Axonal Neuropathy, Giant Cell Arteritis, Giant Cell Inclusion Disease, Globoid Cell Leukodystrophy, Glossopharyngeal Neuralgia, Glycogen Storage Disease, Guillain-Barre Syndrome, Hallervorden-Spatz Disease, Head Injury, Headache, Hemicrania Continua, Hemifacial Spasm, Hemiplegia Alterans, Hereditary Neuropathies, Hereditary Spastic Paraplegia, Heredopathia Atactica Polyneuritiformis, Herpes Zoster, Herpes Zoster Oticus, Hirayama Syndrome, Holmes-Adie syndrome, Holoprosencephaly, HTLV-1 Associated Myelopathy, Hughes Syndrome, Huntington's Disease, Hurler syndrome, Hydranencephaly, Hydrocephalus, Hydrocephalus-Normal Pressure, Hydromyelia, Hypercortisolism, Hypersomnia, Hypertonia, Hypotonia, Hypoxia, Immune-Mediated Encephalomyelitis, Inclusion Body Myositis, Incontinentia Pigmenti, Infantile Hypotonia, Infantile Neuroaxonal Dystrophy, Infantile Phytanic Acid Storage Disease, Infantile Refsum Disease, Infantile Spasms, Inflammatory Myopathies, Iniencephaly, Intestinal Lipodystrophy, Intracranial Cysts, Intracranial Hypertension, Isaacs' Syndrome, Joubert Syndrome, Kearns-Sayre Syndrome, Kennedy's Disease, Kinsbourne syndrome, Kleine-Levin Syndrome, Klippel-Feil Syndrome, Klippel-Trenaunay Syndrome (KTS), Klüver-Bucy Syndrome, Korsakoff's Amnesic Syndrome, Krabbe Disease, Kugelberg-Welander Disease, Kuru, Lambert-Eaton Myasthenic Syndrome, Landau-Kleffner Syndrome, Lateral Femoral Cutaneous Nerve Entrapment, Lateral Medullary Syndrome, Learning Disabilities, Leigh's Disease, Lennox-Gastaut Syndrome, Lesch-Nyhan Syndrome, Leukodystrophy, Levine-Critchley Syndrome, Lewy Body Dementia, Lichtheim's disease, Lipid Storage Diseases, Lipoid Proteinosis, Lissencephaly, Locked-In Syndrome, Lou Gehrig's Disease, Lupus-Neurological Sequelae, Lyme Disease-Neurological Complications, Lysosomal storage disorders, Machado-Joseph Disease, Macrencephaly, Megalencephaly, Melkersson-Rosenthal Syndrome, Meningitis, Meningitis and Encephalitis, Menkes Disease, Meralgia Paresthetica, Metachromatic Leukodystrophy, Microcephaly, Migraine, Miller Fisher Syndrome, Mini Stroke, Mitochondrial Myopathy, Mitochondrial DNA depletion syndromes, Moebius Syndrome, Monomelic Amyotrophy, Morvan Syndrome, Motor Neuron Diseases, Moyamoya Disease, Mucolipidoses, Mucopolysaccharidoses, Multi-Infarct Dementia, Multifocal Motor Neuropathy, Multiple Sclerosis, Multiple System Atrophy, Multiple System Atrophy with Orthostatic Hypotension, Muscular Dystrophy, Myasthenia-Congenital, Myasthenia Gravis, Myelinoclastic Diffuse Sclerosis, Myelitis, Myoclonic Encephalopathy of Infants, Myoclonus, Myoclonus epilepsy, Myopathy, Myopathy-Congenital, Myopathy-Thyrotoxic, Myotonia, Myotonia Congenita, Narcolepsy, NARP (neuropathy, ataxia and retinitis pigmentosa), Neuroacanthocytosis, Neurodegeneration with Brain Iron Accumulation, Neurodegenerative disease, Neurofibromatosis, Neuroleptic Malignant Syndrome, Neurological Complications of AIDS, Neurological Complications of Lyme Disease, Neurological Consequences of Cytomegalovirus Infection, Neurological Manifestations of Pompe Disease, Neurological Sequelae Of Lupus, Neuromyelitis Optica, Neuromyotonia, Neuronal Ceroid Lipofuscinosis, Neuronal Migration Disorders, Neuropathic pain, Neuropathy-Hereditary, Neuropathy, Neurosarcoidosis, Neurosyphilis, Neurotoxicity, Nevus Cavernosus, Niemann-Pick Disease, O'Sullivan-McLeod Syndrome, Occipital Neuralgia, Ohtahara Syndrome, Olivopontocerebellar Atrophy, Opsoclonus Myoclonus, Orthostatic Hypotension, Overuse Syndrome, Pain-Chronic, Pantothenate Kinase-Associated Neurodegeneration, Paraneoplastic Syndromes, Paresthesia, Parkinson's Disease, Paroxysmal Choreoathetosis, Paroxysmal Hemicrania, Parry-Romberg, Pelizaeus-Merzbacher Disease, Pena Shokeir II Syndrome, Perineural Cysts, Peroneal muscular atrophy, Periodic Paralyses, Peripheral Neuropathy, Periventricular Leukomalacia, Persistent Vegetative State, Pervasive Developmental Disorders, Phytanic Acid Storage Disease, Pick's Disease, Pinched Nerve, Piriformis Syndrome, Pituitary Tumors, Polymyositis, Pompe Disease, Porencephaly, Post-Polio Syndrome, Postherpetic Neuralgia, Postinfectious Encephalomyelitis, Postural Hypotension, Postural Orthostatic Tachycardia Syndrome, Postural Tachycardia Syndrome, Primary Dentatum Atrophy, Primary Lateral Sclerosis, Primary Progressive Aphasia, Prion Diseases, Progressive bulbar palsy, Progressive Hemifacial Atrophy, Progressive Locomotor Ataxia, Progressive Multifocal Leukoencephalopathy, Progressive Muscular Atrophy, Progressive Sclerosing Poliodystrophy, Progressive Supranuclear Palsy, Prosopagnosia, Pseudobulbar palsy, Pseudo-Torch syndrome, Pseudotoxoplasmosis syndrome, Pseudotumor Cerebri, Psychogenic Movement, Ramsay Hunt Syndrome I, Ramsay Hunt Syndrome II, Rasmussen's Encephalitis, Reflex Sympathetic Dystrophy Syndrome, Refsum Disease, Refsum Disease-Infantile, Repetitive Motion Disorders, Repetitive Stress Injuries, Restless Legs Syndrome, Retrovirus-Associated Myelopathy, Rett Syndrome, Reye's Syndrome, Rheumatic Encephalitis, Riley-Day Syndrome, Sacral Nerve Root Cysts, Saint Vitus Dance, Salivary Gland Disease, Sandhoff Disease, Schilder's Disease, Schizencephaly, Seitelberger Disease, Seizure Disorder, Semantic Dementia, Septo-Optic Dysplasia, Severe Myoclonic Epilepsy of Infancy (SMEI), Shaken Baby Syndrome, Shingles, Shy-Drager Syndrome, Sjögren's Syndrome, Sleep Apnea, Sleeping Sickness, Sotos Syndrome, Spasticity, Spina Bifida, Spinal Cord Infarction, Spinal Cord Injury, Spinal Cord Tumors, Spinal Muscular Atrophy, Spinocerebellar Ataxia, Spinocerebellar Atrophy, Spinocerebellar Degeneration, Sporadic ataxia, Steele-Richardson-Olszewski Syndrome, Stiff-Person Syndrome, Striatonigral Degeneration, Stroke, Sturge-Weber Syndrome, Subacute Sclerosing Panencephalitis, Subcortical Arteriosclerotic Encephalopathy, Short-lasting, Unilateral, Neuralgiform (SUNCT) Headache, Swallowing Disorders, Sydenham Chorea, Syncope, Syphilitic Spinal Sclerosis, Syringohydromyelia, Syringomyelia, Systemic Lupus Erythematosus, Tabes Dorsalis, Tardive Dyskinesia, Tarlov Cysts, Tay-Sachs Disease, Temporal Arteritis, Tethered Spinal Cord Syndrome, Thomsen's Myotonia, Thoracic Outlet Syndrome, Thyrotoxic Myopathy, Tic Douloureux, Todd's Paralysis, Tourette Syndrome, Transient Ischemic Attack, Transmissible Spongiform Encephalopathies, Transverse Myelitis, Traumatic Brain Injury, Tremor, Trigeminal Neuralgia, Tropical Spastic Paraparesis, Troyer Syndrome, Tuberous Sclerosis, Vascular Erectile Tumor, Vasculitis Syndromes of the Central and Peripheral Nervous Systems, Vitamin B12 deficiency, Von Economo's Disease, Von Hippel-Lindau Disease (VHL), Von Recklinghausen's Disease, Wallenberg's Syndrome, Werdnig-Hoffman Disease, Wernicke-Korsakoff Syndrome, West Syndrome, Whiplash, Whipple's Disease, Williams Syndrome, Wilson Disease, Wolman's Disease, X-Linked Spinal and Bulbar Muscular Atrophy.

### Methods of Treatment of Neurological Disease

### TRACER AAV Particles Encoding Protein Payloads

[0186] Provided in the present disclosure are methods for introducing the TRACER AAV particles of the present disclosure into cells, the method comprising introducing into said cells any of the vectors in an amount sufficient for an increase in the production of target mRNA and protein to occur. In some aspects, the cells may be neurons such as but not limited to, motor, hippocampal, entorhinal, thalamic, cortical, sensory, sympathetic, or parasympathetic neurons, and glial cells such as astrocytes, microglia, and/or oligodendrocytes.

[0187] Disclosed in the present disclosure are methods for treating neurological disease associated with insufficient function/presence of a target protein (e.g., ApoE, FXN) in a subject in need of treatment. The method optionally comprises administering to the subject a therapeutically effective amount of a composition comprising TRACER AAV particles of the present disclosure. As a non-limiting example, the TRACER AAV particles can increase target gene expression, increase target protein production, and thus reduce one or more symptoms of neurological disease in the subject such that the subject is therapeutically treated.

[0188] In one embodiment, the composition comprising the TRACER AAV particles of the present disclosure is administered to the central nervous system of the subject via systemic administration. In one embodiment, the systemic administration is intravenous injection.

[0189] In some embodiments, the composition comprising the TRACER AAV particles of the present disclosure is administered to the central nervous system of the subject. In other embodiments, the composition comprising the TRACER AAV particles of the present disclosure is administered to a CNS tissue of a subject (e.g., putamen, thalamus or cortex of the subject).

[0190] In one embodiment, the composition comprising the TRACER AAV particles of the present disclosure is administered to the central nervous system of the subject via intraparenchymal injection. Non-limiting examples of intraparenchymal injections include intraputamenal, intracortical, intrathalamic, intrastriatal, intrahippocampal or into the entorhinal cortex.

[0191] In one embodiment, the composition comprising the TRACER AAV particles of the present disclosure is administered to the central nervous system of the subject via intraparenchymal injection and intravenous injection.

[0192] In one embodiment, the TRACER AAV particles of the present disclosure may be delivered into specific types of targeted cells, including, but not limited to, thalamic, hippocampal, entorhinal, cortical, motor, sensory, excitatory, inhibitory, sympathetic, or parasympathetic neurons; glial cells including oligodendrocytes, astrocytes and microglia; and/or other cells surrounding neurons such as T cells.

[0193] In one embodiment, the TRACER AAV particles of the present disclosure may be delivered to neurons in the putamen, thalamus and/or cortex.

[0194] In some embodiments, the TRACER AAV particles of the present disclosure may be used as a therapy for neurological disease.

[0195] In some embodiments, the TRACER AAV particles of the present disclosure may be used as a therapy for tauopathies.

[0196] In some embodiments, the TRACER AAV particles of the present disclosure may be used as a therapy for Alzheimer's Disease.

[0197] In some embodiments, the TRACER AAV particles of the present disclosure may be used as a therapy for Amyotrophic Lateral Sclerosis.

[0198] In some embodiments, the TRACER AAV particles of the present disclosure may be used as a therapy for Huntington's Disease.

[0199] In some embodiments, the TRACER AAV particles of the present disclosure may be used as a therapy for Parkinson's Disease.

[0200] In some embodiments, the TRACER AAV particles of the present disclosure may be used as a therapy for Friedreich's Ataxia.

[0201] In some embodiments, the TRACER AAV particles of the present disclosure may be used as a therapy for chronic or neuropathic pain.

[0202] In one embodiment, administration of the TRACER AAV particles described herein to a subject may increase target protein levels in a subject. The target protein levels may be increased by about 30%, 40%, 50%, 60%, 70%, 80%, 85%, 90%, 95% and 100%, or at least 20-30%, 20-40%, 20-50%, 20-60%, 20-70%, 20-80%, 20-90%, 20-95%, 20-100%, 30-40%, 30-50%, 30-60%, 30-70%, 30-80%, 30-90%, 30-95%, 30-100%, 40-50%, 40-60%, 40-70%, 40-80%, 40-90%, 40-95%, 40-100%, 50-60%, 50-70%, 50-80%, 50-90%, 50-95%, 50-100%, 60-70%, 60-80%, 60-90%, 60-95%, 60-100%, 70-80%, 70-90%, 70-95%, 70-100%, 80-90%, 80-95%, 80-100%, 90-95%, 90-100% or 95-100% in a subject such as, but not limited to, the CNS, a region of the CNS, or a specific cell of the CNS of a subject. As a non-limiting example, the TRACER AAV particles may increase the protein levels of a target protein by at least 50%. As a non-limiting example, the TRACER AAV particles may increase the proteins levels of a target protein by at least 40%. As a non-limiting example, a subject may have an increase of 10% of target protein. As a non-limiting example, the TRACER AAV particles may increase the protein levels of a target protein by fold increases over baseline. In one embodiment, TRACER AAV particles lead to 5-6 times higher levels of a target protein.

[0203] In one embodiment, administration of the TRACER AAV particles described herein to a subject may increase the expression of a target protein in a subject. The expression of the target protein may be increased by about 30%, 40%, 50%, 60%, 70%, 80%, 85%, 90%, 95% and 100%, or at least 20-30%, 20-40%, 20-50%, 20-60%, 20-70%, 20-80%, 20-90%, 20-95%, 20-100%, 30-40%, 30-50%, 30-60%, 30-70%, 30-80%, 30-90%, 30-95%, 30-100%, 40-50%, 40-60%, 40-70%, 40-80%, 40-90%, 40-95%, 40-100%, 50-60%, 50-70%, 50-80%, 50-90%, 50-95%, 50-100%, 60-70%, 60-80%, 60-90%, 60-95%, 60-100%, 70-80%, 70-90%, 70-95%, 70-100%, 80-90%, 80-95%, 80-100%, 90-95%, 90-100% or 95-100% in a subject such as, but not limited to, the CNS, a region of the CNS, or a specific cell of the CNS of a subject. As a non-limiting example, the TRACER AAV particles may increase the expression of a target protein by at least 50%. As a non-limiting example, the TRACER AAV particles may increase the expression of a target protein by at least 40%.

[0204] In one embodiment, intravenous administration of the TRACER AAV particles described herein to a subject may increase the CNS expression of a target protein in a subject. The expression of the target protein may be increased by about 30%, 40%, 50%, 60%, 70%, 80%, 85%, 90%, 95% and 100%, or at least 20-30%, 20-40%, 20-50%, 20-60%, 20-70%, 20-80%, 20-90%, 20-95%, 20-100%, 30-40%, 30-50%, 30-60%, 30-70%, 30-80%, 30-90%, 30-95%, 30-100%, 40-50%, 40-60%, 40-70%, 40-80%, 40-90%, 40-95%, 40-100%, 50-60%, 50-70%, 50-80%, 50-90%, 50-95%, 50-100%, 60-70%, 60-80%, 60-90%, 60-95%, 60-100%, 70-80%, 70-90%, 70-95%, 70-100%, 80-90%, 80-95%, 80-100%, 90-95%, 90-100% or 95-100% in a subject such as, but not limited to, the CNS, a region of the CNS, or a specific cell of the CNS of a subject. As a non-limiting example, the TRACER AAV particles may increase the expression of a target protein in the CNS by at least 50%. As a non-limiting example, the TRACER AAV particles may increase the expression of a target protein in the CNS by at least 40%.

[0205] In some embodiments, the TRACER AAV particles of the present disclosure may be used to increase target protein expression in astrocytes in order to treat a neurological disease. Target protein in astrocytes may be increased by 5%, 10%, 15%, 20%, 25%, 30%, 35%, 40%, 45%, 50%, 55%, 60%, 65%, 70%, 75%, 80%, 85%, 90%, 95%, or more than 95%, 5-15%, 5-20%, 5-25%, 5-30%, 5-35%, 5-40%, 5-45%, 5-50%, 5-55%, 5-60%, 5-65%, 5-70%, 5-75%, 5-80%, 5-85%, 5-90%, 5-95%, 10-20%, 10-25%, 10-30%, 10-35%, 10-40%, 10-45%, 10-50%, 10-55%, 10-60%, 10-65%, 10-70%, 10-75%, 10-80%, 10-85%, 10-90%, 10-95%, 15-25%, 15-30%, 15-35%, 15-40%, 15-45%, 15-50%, 15-55%, 15-60%, 15-65%, 15-70%, 15-75%, 15-80%, 15-85%, 15-90%, 15-95%, 20-30%, 20-35%, 20-40%, 20-45%, 20-50%, 20-55%, 20-60%, 20-65%, 20-70%, 20-75%, 20-80%, 20-85%, 20-90%, 20-95%, 25-35%, 25-40%, 25-45%, 25-50%, 25-55%, 25-60%, 25-65%, 25-70%, 25-75%, 25-80%, 25-85%, 25-90%, 25-95%, 30-40%, 30-45%, 30-50%, 30-55%, 30-60%, 30-65%, 30-70%, 30-75%, 30-80%, 30-85%, 30-90%, 30-95%, 35-45%, 35-50%, 35-55%, 35-60%, 35-65%, 35-70%, 35-75%, 35-80%, 35-85%, 35-90%, 35-95%, 40-50%, 40-55%, 40-60%, 40-65%, 40-70%, 40-75%, 40-80%, 40-85%, 40-90%, 40-95%, 45-55%, 45-60%, 45-65%, 45-70%, 45-75%, 45-80%, 45-85%, 45-90%, 45-95%, 50-60%, 50-65%, 50-70%, 50-75%, 50-80%, 50-85%, 50-90%, 50-95%, 55-65%, 55-70%, 55-75%, 55-80%, 55-85%, 55-90%, 55-95%, 60-70%, 60-75%, 60-80%, 60-85%, 60-90%, 60-95%, 65-75%, 65-80%, 65-85%, 65-90%, 65-95%, 70-80%, 70-85%, 70-90%, 70-95%, 75-85%, 75-90%, 75-95%, 80-90%, 80-95%, or 90-95%.

[0206] In some embodiments, the TRACER AAV particles may be used to increase target protein in microglia. The increase of target protein in microglia may be, independently, increased by 5%, 10%, 15%, 20%, 25%, 30%, 35%, 40%, 45%, 50%, 55%, 60%, 65%, 70%, 75%, 80%, 85%, 90%, 95%, or more than 95%, 5-15%, 5-20%, 5-25%, 5-30%, 5-35%, 5-40%, 5-45%, 5-50%, 5-55%, 5-60%, 5-65%, 5-70%, 5-75%, 5-80%, 5-85%, 5-90%, 5-95%, 10-20%, 10-25%, 10-30%, 10-35%, 10-40%, 10-45%, 10-50%, 10-55%, 10-60%, 10-65%, 10-70%, 10-75%, 10-80%, 10-85%, 10-90%, 10-95%, 15-25%, 15-30%, 15-35%, 15-40%, 15-45%, 15-50%, 15-55%, 15-60%, 15-65%, 15-70%, 15-75%, 15-80%, 15-85%, 15-90%, 15-95%, 20-30%, 20-35%, 20-40%, 20-45%, 20-50%, 20-55%, 20-60%, 20-65%, 20-70%, 20-75%, 20-80%, 20-85%, 20-90%, 20-95%, 25-35%, 25-40%, 25-45%, 25-50%, 25-55%, 25-60%, 25-65%, 25-70%, 25-75%, 25-80%, 25-85%, 25-90%, 25-95%, 30-40%, 30-45%, 30-50%, 30-55%, 30-60%, 30-65%, 30-70%, 30-75%, 30-80%, 30-85%, 30-90%, 30-95%, 35-45%, 35-50%, 35-55%, 35-60%, 35-65%, 35-70%, 35-75%, 35-80%, 35-85%, 35-90%, 35-95%, 40-50%, 40-55%, 40-60%, 40-65%, 40-70%, 40-75%, 40-80%, 40-85%, 40-90%, 40-95%, 45-55%, 45-60%, 45-65%, 45-70%, 45-75%, 45-80%, 45-85%, 45-90%, 45-95%, 50-60%, 50-65%, 50-70%, 50-75%, 50-80%, 50-85%, 50-90%, 50-95%, 55-65%, 55-70%, 55-75%, 55-80%, 55-85%, 55-90%, 55-95%, 60-70%, 60-75%, 60-80%, 60-85%, 60-90%, 60-95%, 65-75%, 65-80%, 65-85%, 65-90%, 65-95%, 70-80%, 70-85%, 70-90%, 70-95%, 75-85%, 75-90%, 75-95%, 80-90%, 80-95%, or 90-95%.

[0207] In some embodiments, the TRACER AAV particles may be used to increase target protein in cortical neurons. The increase of target protein in the cortical neurons may be, independently, increased by 5%, 10%, 15%, 20%, 25%, 30%, 35%, 40%, 45%, 50%, 55%, 60%, 65%, 70%, 75%, 80%, 85%, 90%, 95%, or more than 95%, 5-15%, 5-20%, 5-25%, 5-30%, 5-35%, 5-40%, 5-45%, 5-50%, 5-55%, 5-60%, 5-65%, 5-70%, 5-75%, 5-80%, 5-85%, 5-90%, 5-95%, 10-20%, 10-25%, 10-30%, 10-35%, 10-40%, 10-45%, 10-50%, 10-55%, 10-60%, 10-65%, 10-70%, 10-75%, 10-80%, 10-85%, 10-90%, 10-95%, 15-25%, 15-30%, 15-35%, 15-40%, 15-45%, 15-50%, 15-55%, 15-60%, 15-65%, 15-70%, 15-75%, 15-80%, 15-85%, 15-90%, 15-95%, 20-30%, 20-35%, 20-40%, 20-45%, 20-50%, 20-55%, 20-60%, 20-65%, 20-70%, 20-75%, 20-80%, 20-85%, 20-90%, 20-95%, 25-35%, 25-40%, 25-45%, 25-50%, 25-55%, 25-60%, 25-65%, 25-70%, 25-75%, 25-80%, 25-85%, 25-90%, 25-95%, 30-40%, 30-45%, 30-50%, 30-55%, 30-60%, 30-65%, 30-70%, 30-75%, 30-80%, 30-85%, 30-90%, 30-95%, 35-45%, 35-50%, 35-55%, 35-60%, 35-65%, 35-70%, 35-75%, 35-80%, 35-85%, 35-90%, 35-95%, 40-50%, 40-55%, 40-60%, 40-65%, 40-70%, 40-75%, 40-80%, 40-85%, 40-90%, 40-95%, 45-55%, 45-60%, 45-65%, 45-70%, 45-75%, 45-80%, 45-85%, 45-90%, 45-95%, 50-60%, 50-65%, 50-70%, 50-75%, 50-80%, 50-85%, 50-90%, 50-95%, 55-65%, 55-70%, 55-75%, 55-80%, 55-85%, 55-90%, 55-95%, 60-70%, 60-75%, 60-80%, 60-85%, 60-90%, 60-95%, 65-75%, 65-80%, 65-85%, 65-90%, 65-95%, 70-80%, 70-85%, 70-90%, 70-95%, 75-85%, 75-90%, 75-95%, 80-90%, 80-95%, or 90-95%.

[0208] In some embodiments, the TRACER AAV particles may be used to increase target protein in hippocampal neurons. The increase of target protein in the hippocampal neurons may be, independently, increased by 5%, 10%, 15%, 20%, 25%, 30%, 35%, 40%, 45%, 50%, 55%, 60%, 65%, 70%, 75%, 80%, 85%, 90%, 95%, or more than 95%, 5-15%, 5-20%, 5-25%, 5-30%, 5-35%, 5-40%, 5-45%, 5-50%, 5-55%, 5-60%, 5-65%, 5-70%, 5-75%, 5-80%, 5-85%, 5-90%, 5-95%, 10-20%, 10-25%, 10-30%, 10-35%, 10-40%, 10-45%, 10-50%, 10-55%, 10-60%, 10-65%, 10-70%, 10-75%, 10-80%, 10-85%, 10-90%, 10-95%, 15-25%, 15-30%, 15-35%, 15-40%, 15-45%, 15-50%, 15-55%, 15-60%, 15-65%, 15-70%, 15-75%, 15-80%, 15-85%, 15-90%, 15-95%, 20-30%, 20-35%, 20-40%, 20-45%, 20-50%, 20-55%, 20-60%, 20-65%, 20-70%, 20-75%, 20-80%, 20-85%, 20-90%, 20-95%, 25-35%, 25-40%, 25-45%, 25-50%, 25-55%, 25-60%, 25-65%, 25-70%, 25-75%, 25-80%, 25-85%, 25-90%, 25-95%, 30-40%, 30-45%, 30-50%, 30-55%, 30-60%, 30-65%, 30-70%, 30-75%, 30-80%, 30-85%, 30-90%, 30-95%, 35-45%, 35-50%, 35-55%, 35-60%, 35-65%, 35-70%, 35-75%, 35-80%, 35-85%, 35-90%, 35-95%, 40-50%, 40-55%, 40-60%, 40-65%, 40-70%, 40-75%, 40-80%, 40-85%, 40-90%, 40-95%, 45-55%, 45-60%, 45-65%, 45-70%, 45-75%, 45-80%, 45-85%, 45-90%, 45-95%, 50-60%, 50-65%, 50-70%, 50-75%, 50-80%, 50-85%, 50-90%, 50-95%, 55-65%, 55-70%, 55-75%, 55-80%, 55-85%, 55-90%, 55-95%, 60-70%, 60-75%, 60-80%, 60-85%, 60-90%, 60-95%, 65-75%, 65-80%, 65-85%, 65-90%, 65-95%, 70-80%, 70-85%, 70-90%, 70-95%, 75-85%, 75-90%, 75-95%, 80-90%, 80-95%, or 90-95%.

[0209] In some embodiments, the TRACER AAV particles may be used to increase target protein in DRG and/or sympathetic neurons. The increase of target protein in the DRG and/or sympathetic neurons may be, independently, increased by 5%, 10%, 15%, 20%, 25%, 30%, 35%, 40%, 45%, 50%, 55%, 60%, 65%, 70%, 75%, 80%, 85%, 90%, 95%, or more than 95%, 5-15%, 5-20%, 5-25%, 5-30%, 5-35%, 5-40%, 5-45%, 5-50%, 5-55%, 5-60%, 5-65%, 5-70%, 5-75%, 5-80%, 5-85%, 5-90%, 5-95%, 10-20%, 10-25%, 10-30%, 10-35%, 10-40%, 10-45%, 10-50%, 10-55%, 10-60%, 10-65%, 10-70%, 10-75%, 10-80%, 10-85%, 10-90%, 10-95%, 15-25%, 15-30%, 15-35%, 15-40%, 15-45%, 15-50%, 15-55%, 15-60%, 15-65%, 15-70%, 15-75%, 15-80%, 15-85%, 15-90%, 15-95%, 20-30%, 20-35%, 20-40%, 20-45%, 20-50%, 20-55%, 20-60%, 20-65%, 20-70%, 20-75%, 20-80%, 20-85%, 20-90%, 20-95%, 25-35%, 25-40%, 25-45%, 25-50%, 25-55%, 25-60%, 25-65%, 25-70%, 25-75%, 25-80%, 25-85%, 25-90%, 25-95%, 30-40%, 30-45%, 30-50%, 30-55%, 30-60%, 30-65%, 30-70%, 30-75%, 30-80%, 30-85%, 30-90%, 30-95%, 35-45%, 35-50%, 35-55%, 35-60%, 35-65%, 35-70%, 35-75%, 35-80%, 35-85%, 35-90%, 35-95%, 40-50%, 40-55%, 40-60%, 40-65%, 40-70%, 40-75%, 40-80%, 40-85%, 40-90%, 40-95%, 45-55%, 45-60%, 45-65%, 45-70%, 45-75%, 45-80%, 45-85%, 45-90%, 45-95%, 50-60%, 50-65%, 50-70%, 50-75%, 50-80%, 50-85%, 50-90%, 50-95%, 55-65%, 55-70%, 55-75%, 55-80%, 55-85%, 55-90%, 55-95%, 60-70%, 60-75%, 60-80%, 60-85%, 60-90%, 60-95%, 65-75%, 65-80%, 65-85%, 65-90%, 65-95%, 70-80%, 70-85%, 70-90%, 70-95%, 75-85%, 75-90%, 75-95%, 80-90%, 80-95%, or 90-95%.

[0210] In some embodiments, the TRACER AAV particles of the present disclosure may be used to increase target protein in sensory neurons in order to treat neurological disease. Target protein in sensory neurons may be increased by 5%, 10%, 15%, 20%, 25%, 30%, 35%, 40%, 45%, 50%, 55%, 60%, 65%, 70%, 75%, 80%, 85%, 90%, 95%, or more than 95%, 5-15%, 5-20%, 5-25%, 5-30%, 5-35%, 5-40%, 5-45%, 5-50%, 5-55%, 5-60%, 5-65%, 5-70%, 5-75%, 5-80%, 5-85%, 5-90%, 5-95%, 10-20%, 10-25%, 10-30%, 10-35%, 10-40%, 10-45%, 10-50%, 10-55%, 10-60%, 10-65%, 10-70%, 10-75%, 10-80%, 10-85%, 10-90%, 10-95%, 15-25%, 15-30%, 15-35%, 15-40%, 15-45%, 15-50%, 15-55%, 15-60%, 15-65%, 15-70%, 15-75%, 15-80%, 15-85%, 15-90%, 15-95%, 20-30%, 20-35%, 20-40%, 20-45%, 20-50%, 20-55%, 20-60%, 20-65%, 20-70%, 20-75%, 20-80%, 20-85%, 20-90%, 20-95%, 25-35%, 25-40%, 25-45%, 25-50%, 25-55%, 25-60%, 25-65%, 25-70%, 25-75%, 25-80%, 25-85%, 25-90%, 25-95%, 30-40%, 30-45%, 30-50%, 30-55%, 30-60%, 30-65%, 30-70%, 30-75%, 30-80%, 30-85%, 30-90%, 30-95%, 35-45%, 35-50%, 35-55%, 35-60%, 35-65%, 35-70%, 35-75%, 35-80%, 35-85%, 35-90%, 35-95%, 40-50%, 40-55%, 40-60%, 40-65%, 40-70%, 40-75%, 40-80%, 40-85%, 40-90%, 40-95%, 45-55%, 45-60%, 45-65%, 45-70%, 45-75%, 45-80%, 45-85%, 45-90%, 45-95%, 50-60%, 50-65%, 50-70%, 50-75%, 50-80%, 50-85%, 50-90%, 50-95%, 55-65%, 55-70%, 55-75%, 55-80%, 55-85%, 55-90%, 55-95%, 60-70%, 60-75%, 60-80%, 60-85%, 60-90%, 60-95%, 65-75%, 65-80%, 65-85%, 65-90%, 65-95%, 70-80%, 70-85%, 70-90%, 70-95%, 75-85%, 75-90%, 75-95%, 80-90%, 80-95%, or 90-95%.

[0211] In some embodiments, the TRACER AAV particles of the present disclosure may be used to increase target protein and reduce symptoms of neurological disease in a subject. The increase of target protein and/or the reduction of symptoms of neurological disease may be, independently, altered (increased for the production of target protein and reduced for the symptoms of neurological disease) by 5%, 10%, 15%, 20%, 25%, 30%, 35%, 40%, 45%, 50%, 55%, 60%, 65%, 70%, 75%, 80%, 85%, 90%, 95%, or more than 95%, 5-15%, 5-20%, 5-25%, 5-30%, 5-35%, 5-40%, 5-45%, 5-50%, 5-55%, 5-60%, 5-65%, 5-70%, 5-75%, 5-80%, 5-85%, 5-90%, 5-95%, 10-20%, 10-25%, 10-30%, 10-35%, 10-40%, 10-45%, 10-50%, 10-55%, 10-60%, 10-65%, 10-70%, 10-75%, 10-80%, 10-85%, 10-90%, 10-95%, 15-25%, 15-30%, 15-35%, 15-40%, 15-45%, 15-50%, 15-55%, 15-60%, 15-65%, 15-70%, 15-75%, 15-80%, 15-85%, 15-90%, 15-95%, 20-30%, 20-35%, 20-40%, 20-45%, 20-50%, 20-55%, 20-60%, 20-65%, 20-70%, 20-75%, 20-80%, 20-85%, 20-90%, 20-95%, 25-35%, 25-40%, 25-45%, 25-50%, 25-55%, 25-60%, 25-65%, 25-70%, 25-75%, 25-80%, 25-85%, 25-90%, 25-95%, 30-40%, 30-45%, 30-50%, 30-55%, 30-60%, 30-65%, 30-70%, 30-75%, 30-80%, 30-85%, 30-90%, 30-95%, 35-45%, 35-50%, 35-55%, 35-60%, 35-65%, 35-70%, 35-75%, 35-80%, 35-85%, 35-90%, 35-95%, 40-50%, 40-55%, 40-60%, 40-65%, 40-70%, 40-75%, 40-80%, 40-85%, 40-90%, 40-95%, 45-55%, 45-60%, 45-65%, 45-70%, 45-75%, 45-80%, 45-85%, 45-90%, 45-95%, 50-60%, 50-65%, 50-70%, 50-75%, 50-80%, 50-85%, 50-90%, 50-95%, 55-65%, 55-70%, 55-75%, 55-80%, 55-85%, 55-90%, 55-95%, 60-70%, 60-75%, 60-80%, 60-85%, 60-90%, 60-95%, 65-75%, 65-80%, 65-85%, 65-90%, 65-95%, 70-80%, 70-85%, 70-90%, 70-95%, 75-85%, 75-90%, 75-95%, 80-90%, 80-95%, or 90-95%.

[0212] In one embodiment, the TRACER AAV particles of the present disclosure may be used to reduce the decline of functional capacity and activities of daily living as measured by a standard evaluation system such as, but not limited to, the total functional capacity (TFC) scale.

[0213] In one embodiment, the TRACER AAV particles of the present disclosure may be used to improve performance on any assessment used to measure symptoms of neurological disease. Such assessments include, but are not limited to ADAS-cog (Alzheimer Disease Assessment Scale-cognitive), MMSE (Mini-Mental State Examination), GDS (Geriatric Depression Scale), FAQ (Functional Activities Questionnaire), ADL (Activities of Daily Living), GPCOG (General Practitioner Assessment of Cognition), Mini-Cog, AMTS (Abbreviated Mental Test Score), Clock-drawing test, 6-CIT (6-item Cognitive Impairment Test), TYM (Test Your Memory), MoCa (Montreal Cognitive Assessment), ACE-R (Addenbrookes Cognitive Assessment), MIS (Memory Impairment Screen), BADLS (Bristol Activities of Daily Living Scale), Barthel Index, Functional Independence Measure, Instrumental Activities of Daily Living, IQCODE (Informant Questionnaire on Cognitive Decline in the Elderly), Neuropsychiatric Inventory, The Cohen-Mansfield Agitation Inventory, BEHAVE-AD, EuroQol, Short Form-36 and/or MBR Caregiver Strain Instrument, or any of the other tests as described in Sheehan B (Ther Adv Neurol Disord. 5(6):349-358 (2012)), the contents of which are herein incorporated by reference in their entirety.

[0214] In some embodiments, the present composition is administered as a solo therapeutic or as combination therapeutic for the treatment of neurological disease.

[0215] The TRACER AAV particles encoding the target protein may be used in combination with one or more other therapeutic agents. By “in combination with,” it is not intended to imply that the agents must be administered at the same time and/or formulated for delivery together, although these methods of delivery are within the scope of the present disclosure. Compositions can be administered concurrently with, prior to, or subsequent to, one or more other desired therapeutics or medical procedures. In general, each agent will be administered at a dose and/or on a time schedule determined for that agent.

[0216] Therapeutic agents that may be used in combination with the TRACER AAV particles of the present disclosure can be small molecule compounds which are antioxidants, anti-inflammatory agents, anti-apoptosis agents, calcium regulators, antiglutamatergic agents, structural protein inhibitors, compounds involved in muscle function, and compounds involved in metal ion regulation. As a non-limiting example, the combination therapy may be in combination with one or more neuroprotective agents such as small molecule compounds, growth factors and hormones which have been tested for their neuroprotective effect on motor neuron degeneration.

[0217] Compounds tested for treating neurological disease which may be used in combination with the TRACER AAV particles described herein include, but are not limited to, cholinesterase inhibitors (donepezil, rivastigmine, galantamine), NMDA receptor antagonists such as memantine, anti-psychotics, anti-depressants, anti-convulsants (e.g., sodium valproate and levetiracetam for myoclonus), secretase inhibitors, amyloid aggregation inhibitors, copper or zinc modulators, BACE inhibitors, inhibitors of tau aggregation, such as Methylene blue, phenothiazines, anthraquinones, n-phenylamines or rhodamines, microtubule stabilizers such as NAP, taxol or paclitaxel, kinase or phosphatase inhibitors such as those targeting GSK3β (lithium) or PP2A, immunization with Aβ peptides or tau phospho-epitopes, anti-tau or anti-amyloid antibodies, dopamine-depleting agents (e.g., tetrabenazine for chorea), benzodiazepines (e.g., clonazepam for myoclonus, chorea, dystonia, rigidity, and/or spasticity), amino acid precursors of dopamine (e.g., levodopa for rigidity), skeletal muscle relaxants (e.g., baclofen, tizanidine for rigidity and/or spasticity), inhibitors for acetylcholine release at the neuromuscular junction to cause muscle paralysis (e.g., botulinum toxin for bruxism and/or dystonia), atypical neuroleptics (e.g., olanzapine and quetiapine for psychosis and/or irritability, risperidone, sulpiride and haloperidol for psychosis, chorea and/or irritability, clozapine for treatment-resistant psychosis, aripiprazole for psychosis with prominent negative symptoms), selective serotonin reuptake inhibitors (SSRIs) (e.g., citalopram, fluoxetine, paroxetine, sertraline, mirtazapine, venlafaxine for depression, anxiety, obsessive compulsive behavior and/or irritability), hypnotics (e.g., xopiclone and/or zolpidem for altered sleep-wake cycle), anticonvulsants (e.g., sodium valproate and carbamazepine for mania or hypomania) and mood stabilizers (e.g., lithium for mania or hypomania).

[0218] Neurotrophic factors may be used in combination therapy with the TRACER AAV particles of the present disclosure for treating neurological disease. Generally, a neurotrophic factor is defined as a substance that promotes survival, growth, differentiation, proliferation and/or maturation of a neuron, or stimulates increased activity of a neuron. In some embodiments, the present methods further comprise delivery of one or more trophic factors into the subject in need of treatment. Trophic factors may include, but are not limited to, IGF-I, GDNF, BDNF, CTNF, VEGF, Colivelin, Xaliproden, Thyrotrophin-releasing hormone and ADNF, and variants thereof.

[0219] In one aspect, the TRACER AAV particle described herein may be co-administered with TRACER AAV particles expressing neurotrophic factors such as AAV-IGF-I (See e.g., Vincent et al., Neuromolecular medicine, 2004, 6, 79-85; the contents of which are incorporated herein by reference in their entirety) and AAV-GDNF (See e.g., Wang et al., J Neurosci., 2002, 22, 6920-6928; the contents of which are incorporated herein by reference in their entirety).

[0220] In one embodiment, administration of the TRACER AAV particles to a subject will increase the expression of a target protein in a subject and the increase of the expression of the target protein will reduce the effects and/or symptoms of neurological disease in a subject.

[0221] As a non-limiting example, the target protein may be an antibody, or fragment thereof.

### TRACER AAV Particles Comprising RNAi Agents or Modulatory Polynucleotides

[0222] Provided in the present disclosure are methods for introducing the TRACER AAV particles of the disclosure, comprising a viral genome with a nucleic acid sequence encoding one or more siRNA molecules into cells, the method comprising introducing into said cells any of the vectors in an amount sufficient for degradation of a target mRNA to occur, thereby activating target-specific RNAi in the cells. In some aspects, the cells may be neurons such as but not limited to, motor, hippocampal, entorhinal, thalamic, cortical, sensory, sympathetic, or parasympathetic neurons, and glial cells such as astrocytes, microglia, and/or oligodendrocytes.

[0223] Disclosed in the present disclosure are methods for treating neurological diseases associated with dysfunction of a target protein in a subject in need of treatment. The method optionally comprises administering to the subject a therapeutically effective amount of a composition comprising TRACER AAV particles comprising a viral genome with a nucleic acid sequence encoding one or more siRNA molecules. As a non-limiting example, the siRNA molecules can silence target gene expression, inhibit target protein production, and reduce one or more symptoms of neurological disease in the subject such that the subject is therapeutically treated.

[0224] In some embodiments, the composition comprising the TRACER AAV particles of the present disclosure comprising a viral genome encoding one or more siRNA molecules comprise an AAV capsid that allows for enhanced transduction of CNS and/or PNS cells after intravenous administration.

[0225] In some embodiments, the composition comprising the TRACER AAV particles of the present disclosure with a viral genome encoding at least one siRNA molecule is administered to the central nervous system of the subject. In other embodiments, the composition comprising the TRACER AAV particles of the present disclosure is administered to a tissue of a subject (e.g., putamen, thalamus or cortex of the subject).

[0226] In one embodiment, the composition comprising the TRACER AAV particles of the disclosure, comprising a viral genome with a nucleic acid sequence encoding one or more siRNA molecules is administered to the central nervous system of the subject via systemic administration. In one embodiment, the systemic administration is intravenous injection.

[0227] In one embodiment, the composition comprising the TRACER AAV particles of the disclosure comprising a viral genome with a nucleic acid sequence encoding one or more siRNA molecules is administered to the central nervous system of the subject via intraparenchymal injection. Non-limiting examples of intraparenchymal injections include intraputamenal, intracortical, intrathalamic, intrastriatal, intrahippocampal or into the entorhinal cortex.

[0228] In one embodiment, the composition comprising the TRACER AAV particles comprising a viral genome with a nucleic acid sequence encoding one or more siRNA molecules is administered to the central nervous system of the subject via intraparenchymal injection and intravenous injection.

[0229] In one embodiment, the TRACER AAV particles comprising a viral genome with a nucleic acid sequence encoding one or more siRNA molecules may be delivered into specific types or targeted cells, including, but not limited to, thalamic, hippocampal, entorhinal, cortical, motor, sensory, excitatory, inhibitory, sympathetic, or parasympathetic neurons; glial cells including oligodendrocytes, astrocytes and microglia; and/or other cells surrounding neurons such as T cells.

[0230] In one embodiment, the TRACER AAV particles comprising a viral genome with a nucleic acid sequence encoding one or more siRNA molecules may be delivered to neurons in the putamen, thalamus, and/or cortex.

[0231] In one embodiment, the TRACER AAV particles comprising a viral genome with a nucleic acid sequence encoding one or more siRNA molecules may be used as a therapy for neurological disease.

[0232] In one embodiment, the TRACER AAV particles comprising a viral genome with a nucleic acid sequence encoding one or more siRNA molecules may be used as a therapy for tauopathies.

[0233] In one embodiment, the TRACER AAV particles comprising a viral genome with a nucleic acid sequence encoding one or more siRNA molecules may be used as a therapy for Alzheimer's Disease.

[0234] In one embodiment, the TRACER AAV particles comprising a viral genome with a nucleic acid sequence encoding one or more siRNA molecules may be used as a therapy for Amyotrophic Lateral Sclerosis.

[0235] In one embodiment, the TRACER AAV particles comprising a viral genome with a nucleic acid sequence encoding one or more siRNA molecules may be used as a therapy for Huntington's Disease.

[0236] In one embodiment, the TRACER AAV particles comprising a viral genome with a nucleic acid sequence encoding one or more siRNA molecules may be used as a therapy for Parkinson's Disease.

[0237] In one embodiment, the TRACER AAV particles comprising a viral genome with a nucleic acid sequence encoding one or more siRNA molecules may be used as a therapy for Friedreich's Ataxia.

[0238] In one embodiment, the administration of TRACER AAV particles comprising a viral genome with a nucleic acid sequence encoding one or more siRNA molecules to a subject may lower target protein levels in a subject. The target protein levels may be lowered by about 30%, 40%, 50%, 60%, 70%, 80%, 85%, 90%, 95% and 100%, or at least 20-30%, 20-40%, 20-50%, 20-60%, 20-70%, 20-80%, 20-90%, 20-95%, 20-100%, 30-40%, 30-50%, 30-60%, 30-70%, 30-80%, 30-90%, 30-95%, 30-100%, 40-50%, 40-60%, 40-70%, 40-80%, 40-90%, 40-95%, 40-100%, 50-60%, 50-70%, 50-80%, 50-90%, 50-95%, 50-100%, 60-70%, 60-80%, 60-90%, 60-95%, 60-100%, 70-80%, 70-90%, 70-95%, 70-100%, 80-90%, 80-95%, 80-100%, 90-95%, 90-100% or 95-100% in a subject such as, but not limited to, the CNS, a region of the CNS, or a specific cell of the CNS of a subject. As a non-limiting example, the TRACER AAV particles may lower the protein levels of a target protein by at least 50%. As a non-limiting example, the TRACER AAV particles may lower the proteins levels of a target protein by at least 40%.

[0239] In one embodiment, the administration of TRACER AAV particles comprising a viral genome with a nucleic acid sequence encoding one or more siRNA molecules to a subject may lower the expression of a target protein in a subject. The expression of a target protein may be lowered by about 30%, 40%, 50%, 60%, 70%, 80%, 85%, 90%, 95% and 100%, or at least 20-30%, 20-40%, 20-50%, 20-60%, 20-70%, 20-80%, 20-90%, 20-95%, 20-100%, 30-40%, 30-50%, 30-60%, 30-70%, 30-80%, 30-90%, 30-95%, 30-100%, 40-50%, 40-60%, 40-70%, 40-80%, 40-90%, 40-95%, 40-100%, 50-60%, 50-70%, 50-80%, 50-90%, 50-95%, 50-100%, 60-70%, 60-80%, 60-90%, 60-95%, 60-100%, 70-80%, 70-90%, 70-95%, 70-100%, 80-90%, 80-95%, 80-100%, 90-95%, 90-100% or 95-100% in a subject such as, but not limited to, the CNS, a region of the CNS, or a specific cell of the CNS of a subject. As a non-limiting example, the TRACER AAV particles may lower the expression of a target protein by at least 50%. As a non-limiting example, the TRACER AAV particles may lower the expression of a target protein by at least 40%.

[0240] In one embodiment, the administration of TRACER AAV particles comprising a viral genome with a nucleic acid sequence encoding one or more siRNA molecules to a subject may lower the expression of a target protein in the CNS of a subject. The expression of a target protein may be lowered by about 30%, 40%, 50%, 60%, 70%, 80%, 85%, 90%, 95% and 100%, or at least 20-30%, 20-40%, 20-50%, 20-60%, 20-70%, 20-80%, 20-90%, 20-95%, 20-100%, 30-40%, 30-50%, 30-60%, 30-70%, 30-80%, 30-90%, 30-95%, 30-100%, 40-50%, 40-60%, 40-70%, 40-80%, 40-90%, 40-95%, 40-100%, 50-60%, 50-70%, 50-80%, 50-90%, 50-95%, 50-100%, 60-70%, 60-80%, 60-90%, 60-95%, 60-100%, 70-80%, 70-90%, 70-95%, 70-100%, 80-90%, 80-95%, 80-100%, 90-95%, 90-100% or 95-100% in a subject such as, but not limited to, the CNS, a region of the CNS, or a specific cell of the CNS of a subject. As a non-limiting example, the TRACER AAV particles may lower the expression of a target protein by at least 50%. As a non-limiting example, the TRACER AAV particles may lower the expression of a target protein by at least 40%.

[0241] In one embodiment, the TRACER AAV particles comprising a viral genome with a nucleic acid sequence encoding one or more siRNA molecules may be used to suppress a target protein in astrocytes in order to treat neurological disease. Target protein in astrocytes may be suppressed by 5%, 10%, 15%, 20%, 25%, 30%, 35%, 40%, 45%, 50%, 55%, 60%, 65%, 70%, 75%, 80%, 85%, 90%, 95%, or more than 95%, 5-15%, 5-20%, 5-25%, 5-30%, 5-35%, 5-40%, 5-45%, 5-50%, 5-55%, 5-60%, 5-65%, 5-70%, 5-75%, 5-80%, 5-85%, 5-90%, 5-95%, 10-20%, 10-25%, 10-30%, 10-35%, 10-40%, 10-45%, 10-50%, 10-55%, 10-60%, 10-65%, 10-70%, 10-75%, 10-80%, 10-85%, 10-90%, 10-95%, 15-25%, 15-30%, 15-35%, 15-40%, 15-45%, 15-50%, 15-55%, 15-60%, 15-65%, 15-70%, 15-75%, 15-80%, 15-85%, 15-90%, 15-95%, 20-30%, 20-35%, 20-40%, 20-45%, 20-50%, 20-55%, 20-60%, 20-65%, 20-70%, 20-75%, 20-80%, 20-85%, 20-90%, 20-95%, 25-35%, 25-40%, 25-45%, 25-50%, 25-55%, 25-60%, 25-65%, 25-70%, 25-75%, 25-80%, 25-85%, 25-90%, 25-95%, 30-40%, 30-45%, 30-50%, 30-55%, 30-60%, 30-65%, 30-70%, 30-75%, 30-80%, 30-85%, 30-90%, 30-95%, 35-45%, 35-50%, 35-55%, 35-60%, 35-65%, 35-70%, 35-75%, 35-80%, 35-85%, 35-90%, 35-95%, 40-50%, 40-55%, 40-60%, 40-65%, 40-70%, 40-75%, 40-80%, 40-85%, 40-90%, 40-95%, 45-55%, 45-60%, 45-65%, 45-70%, 45-75%, 45-80%, 45-85%, 45-90%, 45-95%, 50-60%, 50-65%, 50-70%, 50-75%, 50-80%, 50-85%, 50-90%, 50-95%, 55-65%, 55-70%, 55-75%, 55-80%, 55-85%, 55-90%, 55-95%, 60-70%, 60-75%, 60-80%, 60-85%, 60-90%, 60-95%, 65-75%, 65-80%, 65-85%, 65-90%, 65-95%, 70-80%, 70-85%, 70-90%, 70-95%, 75-85%, 75-90%, 75-95%, 80-90%, 80-95%, or 90-95%. Target protein in astrocytes may be reduced may be 5%, 10%, 15%, 20%, 25%, 30%, 35%, 40%, 45%, 50%, 55%, 60%, 65%, 70%, 75%, 80%, 85%, 90%, 95%, or more than 95%, 5-15%, 5-20%, 5-25%, 5-30%, 5-35%, 5-40%, 5-45%, 5-50%, 5-55%, 5-60%, 5-65%, 5-70%, 5-75%, 5-80%, 5-85%, 5-90%, 5-95%, 10-20%, 10-25%, 10-30%, 10-35%, 10-40%, 10-45%, 10-50%, 10-55%, 10-60%, 10-65%, 10-70%, 10-75%, 10-80%, 10-85%, 10-90%, 10-95%, 15-25%, 15-30%, 15-35%, 15-40%, 15-45%, 15-50%, 15-55%, 15-60%, 15-65%, 15-70%, 15-75%, 15-80%, 15-85%, 15-90%, 15-95%, 20-30%, 20-35%, 20-40%, 20-45%, 20-50%, 20-55%, 20-60%, 20-65%, 20-70%, 20-75%, 20-80%, 20-85%, 20-90%, 20-95%, 25-35%, 25-40%, 25-45%, 25-50%, 25-55%, 25-60%, 25-65%, 25-70%, 25-75%, 25-80%, 25-85%, 25-90%, 25-95%, 30-40%, 30-45%, 30-50%, 30-55%, 30-60%, 30-65%, 30-70%, 30-75%, 30-80%, 30-85%, 30-90%, 30-95%, 35-45%, 35-50%, 35-55%, 35-60%, 35-65%, 35-70%, 35-75%, 35-80%, 35-85%, 35-90%, 35-95%, 40-50%, 40-55%, 40-60%, 40-65%, 40-70%, 40-75%, 40-80%, 40-85%, 40-90%, 40-95%, 45-55%, 45-60%, 45-65%, 45-70%, 45-75%, 45-80%, 45-85%, 45-90%, 45-95%, 50-60%, 50-65%, 50-70%, 50-75%, 50-80%, 50-85%, 50-90%, 50-95%, 55-65%, 55-70%, 55-75%, 55-80%, 55-85%, 55-90%, 55-95%, 60-70%, 60-75%, 60-80%, 60-85%, 60-90%, 60-95%, 65-75%, 65-80%, 65-85%, 65-90%, 65-95%, 70-80%, 70-85%, 70-90%, 70-95%, 75-85%, 75-90%, 75-95%, 80-90%, 80-95%, or 90-95%.

[0242] In one embodiment, the TRACER AAV particles comprising a viral genome with a nucleic acid sequence encoding one or more siRNA molecules may be used to suppress a target protein in microglia. The suppression of the target protein in microglia may be, independently, suppressed by 5%, 10%, 15%, 20%, 25%, 30%, 35%, 40%, 45%, 50%, 55%, 60%, 65%, 70%, 75%, 80%, 85%, 90%, 95%, or more than 95%, 5-15%, 5-20%, 5-25%, 5-30%, 5-35%, 5-40%, 5-45%, 5-50%, 5-55%, 5-60%, 5-65%, 5-70%, 5-75%, 5-80%, 5-85%, 5-90%, 5-95%, 10-20%, 10-25%, 10-30%, 10-35%, 10-40%, 10-45%, 10-50%, 10-55%, 10-60%, 10-65%, 10-70%, 10-75%, 10-80%, 10-85%, 10-90%, 10-95%, 15-25%, 15-30%, 15-35%, 15-40%, 15-45%, 15-50%, 15-55%, 15-60%, 15-65%, 15-70%, 15-75%, 15-80%, 15-85%, 15-90%, 15-95%, 20-30%, 20-35%, 20-40%, 20-45%, 20-50%, 20-55%, 20-60%, 20-65%, 20-70%, 20-75%, 20-80%, 20-85%, 20-90%, 20-95%, 25-35%, 25-40%, 25-45%, 25-50%, 25-55%, 25-60%, 25-65%, 25-70%, 25-75%, 25-80%, 25-85%, 25-90%, 25-95%, 30-40%, 30-45%, 30-50%, 30-55%, 30-60%, 30-65%, 30-70%, 30-75%, 30-80%, 30-85%, 30-90%, 30-95%, 35-45%, 35-50%, 35-55%, 35-60%, 35-65%, 35-70%, 35-75%, 35-80%, 35-85%, 35-90%, 35-95%, 40-50%, 40-55%, 40-60%, 40-65%, 40-70%, 40-75%, 40-80%, 40-85%, 40-90%, 40-95%, 45-55%, 45-60%, 45-65%, 45-70%, 45-75%, 45-80%, 45-85%, 45-90%, 45-95%, 50-60%, 50-65%, 50-70%, 50-75%, 50-80%, 50-85%, 50-90%, 50-95%, 55-65%, 55-70%, 55-75%, 55-80%, 55-85%, 55-90%, 55-95%, 60-70%, 60-75%, 60-80%, 60-85%, 60-90%, 60-95%, 65-75%, 65-80%, 65-85%, 65-90%, 65-95%, 70-80%, 70-85%, 70-90%, 70-95%, 75-85%, 75-90%, 75-95%, 80-90%, 80-95%, or 90-95%. The reduction may be 5%, 10%, 15%, 20%, 25%, 30%, 35%, 40%, 45%, 50%, 55%, 60%, 65%, 70%, 75%, 80%, 85%, 90%, 95%, or more than 95%, 5-15%, 5-20%, 5-25%, 5-30%, 5-35%, 5-40%, 5-45%, 5-50%, 5-55%, 5-60%, 5-65%, 5-70%, 5-75%, 5-80%, 5-85%, 5-90%, 5-95%, 10-20%, 10-25%, 10-30%, 10-35%, 10-40%, 10-45%, 10-50%, 10-55%, 10-60%, 10-65%, 10-70%, 10-75%, 10-80%, 10-85%, 10-90%, 10-95%, 15-25%, 15-30%, 15-35%, 15-40%, 15-45%, 15-50%, 15-55%, 15-60%, 15-65%, 15-70%, 15-75%, 15-80%, 15-85%, 15-90%, 15-95%, 20-30%, 20-35%, 20-40%, 20-45%, 20-50%, 20-55%, 20-60%, 20-65%, 20-70%, 20-75%, 20-80%, 20-85%, 20-90%, 20-95%, 25-35%, 25-40%, 25-45%, 25-50%, 25-55%, 25-60%, 25-65%, 25-70%, 25-75%, 25-80%, 25-85%, 25-90%, 25-95%, 30-40%, 30-45%, 30-50%, 30-55%, 30-60%, 30-65%, 30-70%, 30-75%, 30-80%, 30-85%, 30-90%, 30-95%, 35-45%, 35-50%, 35-55%, 35-60%, 35-65%, 35-70%, 35-75%, 35-80%, 35-85%, 35-90%, 35-95%, 40-50%, 40-55%, 40-60%, 40-65%, 40-70%, 40-75%, 40-80%, 40-85%, 40-90%, 40-95%, 45-55%, 45-60%, 45-65%, 45-70%, 45-75%, 45-80%, 45-85%, 45-90%, 45-95%, 50-60%, 50-65%, 50-70%, 50-75%, 50-80%, 50-85%, 50-90%, 50-95%, 55-65%, 55-70%, 55-75%, 55-80%, 55-85%, 55-90%, 55-95%, 60-70%, 60-75%, 60-80%, 60-85%, 60-90%, 60-95%, 65-75%, 65-80%, 65-85%, 65-90%, 65-95%, 70-80%, 70-85%, 70-90%, 70-95%, 75-85%, 75-90%, 75-95%, 80-90%, 80-95%, or 90-95%.

[0243] In one embodiment, the TRACER AAV particles comprising a viral genome with a nucleic acid sequence encoding one or more siRNA molecules may be used to suppress target protein in cortical neurons. The suppression of a target protein in cortical neurons may be, independently, suppressed by 5%, 10%, 15%, 20%, 25%, 30%, 35%, 40%, 45%, 50%, 55%, 60%, 65%, 70%, 75%, 80%, 85%, 90%, 95%, or more than 95%, 5-15%, 5-20%, 5-25%, 5-30%, 5-35%, 5-40%, 5-45%, 5-50%, 5-55%, 5-60%, 5-65%, 5-70%, 5-75%, 5-80%, 5-85%, 5-90%, 5-95%, 10-20%, 10-25%, 10-30%, 10-35%, 10-40%, 10-45%, 10-50%, 10-55%, 10-60%, 10-65%, 10-70%, 10-75%, 10-80%, 10-85%, 10-90%, 10-95%, 15-25%, 15-30%, 15-35%, 15-40%, 15-45%, 15-50%, 15-55%, 15-60%, 15-65%, 15-70%, 15-75%, 15-80%, 15-85%, 15-90%, 15-95%, 20-30%, 20-35%, 20-40%, 20-45%, 20-50%, 20-55%, 20-60%, 20-65%, 20-70%, 20-75%, 20-80%, 20-85%, 20-90%, 20-95%, 25-35%, 25-40%, 25-45%, 25-50%, 25-55%, 25-60%, 25-65%, 25-70%, 25-75%, 25-80%, 25-85%, 25-90%, 25-95%, 30-40%, 30-45%, 30-50%, 30-55%, 30-60%, 30-65%, 30-70%, 30-75%, 30-80%, 30-85%, 30-90%, 30-95%, 35-45%, 35-50%, 35-55%, 35-60%, 35-65%, 35-70%, 35-75%, 35-80%, 35-85%, 35-90%, 35-95%, 40-50%, 40-55%, 40-60%, 40-65%, 40-70%, 40-75%, 40-80%, 40-85%, 40-90%, 40-95%, 45-55%, 45-60%, 45-65%, 45-70%, 45-75%, 45-80%, 45-85%, 45-90%, 45-95%, 50-60%, 50-65%, 50-70%, 50-75%, 50-80%, 50-85%, 50-90%, 50-95%, 55-65%, 55-70%, 55-75%, 55-80%, 55-85%, 55-90%, 55-95%, 60-70%, 60-75%, 60-80%, 60-85%, 60-90%, 60-95%, 65-75%, 65-80%, 65-85%, 65-90%, 65-95%, 70-80%, 70-85%, 70-90%, 70-95%, 75-85%, 75-90%, 75-95%, 80-90%, 80-95%, or 90-95%. The reduction may be 5%, 10%, 15%, 20%, 25%, 30%, 35%, 40%, 45%, 50%, 55%, 60%, 65%, 70%, 75%, 80%, 85%, 90%, 95%, or more than 95%, 5-15%, 5-20%, 5-25%, 5-30%, 5-35%, 5-40%, 5-45%, 5-50%, 5-55%, 5-60%, 5-65%, 5-70%, 5-75%, 5-80%, 5-85%, 5-90%, 5-95%, 10-20%, 10-25%, 10-30%, 10-35%, 10-40%, 10-45%, 10-50%, 10-55%, 10-60%, 10-65%, 10-70%, 10-75%, 10-80%, 10-85%, 10-90%, 10-95%, 15-25%, 15-30%, 15-35%, 15-40%, 15-45%, 15-50%, 15-55%, 15-60%, 15-65%, 15-70%, 15-75%, 15-80%, 15-85%, 15-90%, 15-95%, 20-30%, 20-35%, 20-40%, 20-45%, 20-50%, 20-55%, 20-60%, 20-65%, 20-70%, 20-75%, 20-80%, 20-85%, 20-90%, 20-95%, 25-35%, 25-40%, 25-45%, 25-50%, 25-55%, 25-60%, 25-65%, 25-70%, 25-75%, 25-80%, 25-85%, 25-90%, 25-95%, 30-40%, 30-45%, 30-50%, 30-55%, 30-60%, 30-65%, 30-70%, 30-75%, 30-80%, 30-85%, 30-90%, 30-95%, 35-45%, 35-50%, 35-55%, 35-60%, 35-65%, 35-70%, 35-75%, 35-80%, 35-85%, 35-90%, 35-95%, 40-50%, 40-55%, 40-60%, 40-65%, 40-70%, 40-75%, 40-80%, 40-85%, 40-90%, 40-95%, 45-55%, 45-60%, 45-65%, 45-70%, 45-75%, 45-80%, 45-85%, 45-90%, 45-95%, 50-60%, 50-65%, 50-70%, 50-75%, 50-80%, 50-85%, 50-90%, 50-95%, 55-65%, 55-70%, 55-75%, 55-80%, 55-85%, 55-90%, 55-95%, 60-70%, 60-75%, 60-80%, 60-85%, 60-90%, 60-95%, 65-75%, 65-80%, 65-85%, 65-90%, 65-95%, 70-80%, 70-85%, 70-90%, 70-95%, 75-85%, 75-90%, 75-95%, 80-90%, 80-95%, or 90-95%.

[0244] In one embodiment, the TRACER AAV particles comprising a viral genome with a nucleic acid sequence encoding one or more siRNA molecules may be used to suppress a target protein in hippocampal neurons. The suppression of a target protein in the hippocampal neurons may be, independently, suppressed by 5%, 10%, 15%, 20%, 25%, 30%, 35%, 40%, 45%, 50%, 55%, 60%, 65%, 70%, 75%, 80%, 85%, 90%, 95%, or more than 95%, 5-15%, 5-20%, 5-25%, 5-30%, 5-35%, 5-40%, 5-45%, 5-50%, 5-55%, 5-60%, 5-65%, 5-70%, 5-75%, 5-80%, 5-85%, 5-90%, 5-95%, 10-20%, 10-25%, 10-30%, 10-35%, 10-40%, 10-45%, 10-50%, 10-55%, 10-60%, 10-65%, 10-70%, 10-75%, 10-80%, 10-85%, 10-90%, 10-95%, 15-25%, 15-30%, 15-35%, 15-40%, 15-45%, 15-50%, 15-55%, 15-60%, 15-65%, 15-70%, 15-75%, 15-80%, 15-85%, 15-90%, 15-95%, 20-30%, 20-35%, 20-40%, 20-45%, 20-50%, 20-55%, 20-60%, 20-65%, 20-70%, 20-75%, 20-80%, 20-85%, 20-90%, 20-95%, 25-35%, 25-40%, 25-45%, 25-50%, 25-55%, 25-60%, 25-65%, 25-70%, 25-75%, 25-80%, 25-85%, 25-90%, 25-95%, 30-40%, 30-45%, 30-50%, 30-55%, 30-60%, 30-65%, 30-70%, 30-75%, 30-80%, 30-85%, 30-90%, 30-95%, 35-45%, 35-50%, 35-55%, 35-60%, 35-65%, 35-70%, 35-75%, 35-80%, 35-85%, 35-90%, 35-95%, 40-50%, 40-55%, 40-60%, 40-65%, 40-70%, 40-75%, 40-80%, 40-85%, 40-90%, 40-95%, 45-55%, 45-60%, 45-65%, 45-70%, 45-75%, 45-80%, 45-85%, 45-90%, 45-95%, 50-60%, 50-65%, 50-70%, 50-75%, 50-80%, 50-85%, 50-90%, 50-95%, 55-65%, 55-70%, 55-75%, 55-80%, 55-85%, 55-90%, 55-95%, 60-70%, 60-75%, 60-80%, 60-85%, 60-90%, 60-95%, 65-75%, 65-80%, 65-85%, 65-90%, 65-95%, 70-80%, 70-85%, 70-90%, 70-95%, 75-85%, 75-90%, 75-95%, 80-90%, 80-95%, or 90-95%. The reduction may be 5%, 10%, 15%, 20%, 25%, 30%, 35%, 40%, 45%, 50%, 55%, 60%, 65%, 70%, 75%, 80%, 85%, 90%, 95%, or more than 95%, 5-15%, 5-20%, 5-25%, 5-30%, 5-35%, 5-40%, 5-45%, 5-50%, 5-55%, 5-60%, 5-65%, 5-70%, 5-75%, 5-80%, 5-85%, 5-90%, 5-95%, 10-20%, 10-25%, 10-30%, 10-35%, 10-40%, 10-45%, 10-50%, 10-55%, 10-60%, 10-65%, 10-70%, 10-75%, 10-80%, 10-85%, 10-90%, 10-95%, 15-25%, 15-30%, 15-35%, 15-40%, 15-45%, 15-50%, 15-55%, 15-60%, 15-65%, 15-70%, 15-75%, 15-80%, 15-85%, 15-90%, 15-95%, 20-30%, 20-35%, 20-40%, 20-45%, 20-50%, 20-55%, 20-60%, 20-65%, 20-70%, 20-75%, 20-80%, 20-85%, 20-90%, 20-95%, 25-35%, 25-40%, 25-45%, 25-50%, 25-55%, 25-60%, 25-65%, 25-70%, 25-75%, 25-80%, 25-85%, 25-90%, 25-95%, 30-40%, 30-45%, 30-50%, 30-55%, 30-60%, 30-65%, 30-70%, 30-75%, 30-80%, 30-85%, 30-90%, 30-95%, 35-45%, 35-50%, 35-55%, 35-60%, 35-65%, 35-70%, 35-75%, 35-80%, 35-85%, 35-90%, 35-95%, 40-50%, 40-55%, 40-60%, 40-65%, 40-70%, 40-75%, 40-80%, 40-85%, 40-90%, 40-95%, 45-55%, 45-60%, 45-65%, 45-70%, 45-75%, 45-80%, 45-85%, 45-90%, 45-95%, 50-60%, 50-65%, 50-70%, 50-75%, 50-80%, 50-85%, 50-90%, 50-95%, 55-65%, 55-70%, 55-75%, 55-80%, 55-85%, 55-90%, 55-95%, 60-70%, 60-75%, 60-80%, 60-85%, 60-90%, 60-95%, 65-75%, 65-80%, 65-85%, 65-90%, 65-95%, 70-80%, 70-85%, 70-90%, 70-95%, 75-85%, 75-90%, 75-95%, 80-90%, 80-95%, or 90-95%.

[0245] In one embodiment, the TRACER AAV particles comprising a viral genome with a nucleic acid sequence encoding one or more siRNA molecules may be used to suppress a target protein in DRG and/or sympathetic neurons. The suppression of a target protein in the DRG and/or sympathetic neurons may be, independently, suppressed by 5%, 10%, 15%, 20%, 25%, 30%, 35%, 40%, 45%, 50%, 55%, 60%, 65%, 70%, 75%, 80%, 85%, 90%, 95%, or more than 95%, 5-15%, 5-20%, 5-25%, 5-30%, 5-35%, 5-40%, 5-45%, 5-50%, 5-55%, 5-60%, 5-65%, 5- 70%, 5-75%, 5-80%, 5-85%, 5-90%, 5-95%, 10-20%, 10-25%, 10-30%, 10-35%, 10-40%, 10-45%, 10-50%, 10-55%, 10-60%, 10-65%, 10-70%, 10-75%, 10-80%, 10-85%, 10-90%, 10-95%, 15-25%, 15-30%, 15-35%, 15-40%, 15-45%, 15-50%, 15-55%, 15-60%, 15-65%, 15-70%, 15-75%, 15-80%, 15-85%, 15-90%, 15-95%, 20-30%, 20-35%, 20-40%, 20-45%, 20-50%, 20-55%, 20-60%, 20-65%, 20-70%, 20-75%, 20-80%, 20-85%, 20-90%, 20-95%, 25-35%, 25-40%, 25-45%, 25-50%, 25-55%, 25-60%, 25-65%, 25-70%, 25-75%, 25-80%, 25-85%, 25-90%, 25-95%, 30-40%, 30-45%, 30-50%, 30-55%, 30-60%, 30-65%, 30-70%, 30-75%, 30-80%, 30-85%, 30-90%, 30-95%, 35-45%, 35-50%, 35-55%, 35-60%, 35-65%, 35-70%, 35-75%, 35-80%, 35-85%, 35-90%, 35-95%, 40-50%, 40-55%, 40-60%, 40-65%, 40-70%, 40-75%, 40-80%, 40-85%, 40-90%, 40-95%, 45-55%, 45-60%, 45-65%, 45-70%, 45-75%, 45-80%, 45-85%, 45-90%, 45-95%, 50-60%, 50-65%, 50-70%, 50-75%, 50-80%, 50-85%, 50-90%, 50-95%, 55-65%, 55-70%, 55-75%, 55-80%, 55-85%, 55-90%, 55-95%, 60-70%, 60-75%, 60-80%, 60-85%, 60-90%, 60-95%, 65-75%, 65-80%, 65-85%, 65-90%, 65-95%, 70-80%, 70-85%, 70-90%, 70-95%, 75-85%, 75-90%, 75-95%, 80-90%, 80-95%, or 90-95%. The reduction may be 5%, 10%, 15%, 20%, 25%, 30%, 35%, 40%, 45%, 50%, 55%, 60%, 65%, 70%, 75%, 80%, 85%, 90%, 95%, or more than 95%, 5-15%, 5-20%, 5-25%, 5-30%, 5-35%, 5-40%, 5-45%, 5-50%, 5-55%, 5-60%, 5-65%, 5- 70%, 5-75%, 5-80%, 5-85%, 5-90%, 5-95%, 10-20%, 10-25%, 10-30%, 10-35%, 10-40%, 10-45%, 10-50%, 10-55%, 10-60%, 10-65%, 10-70%, 10-75%, 10-80%, 10-85%, 10-90%, 10-95%, 15-25%, 15-30%, 15-35%, 15-40%, 15-45%, 15-50%, 15-55%, 15-60%, 15-65%, 15-70%, 15-75%, 15-80%, 15-85%, 15-90%, 15-95%, 20-30%, 20-35%, 20-40%, 20-45%, 20-50%, 20-55%, 20-60%, 20-65%, 20-70%, 20-75%, 20-80%, 20-85%, 20-90%, 20-95%, 25-35%, 25-40%, 25-45%, 25-50%, 25-55%, 25-60%, 25-65%, 25-70%, 25-75%, 25-80%, 25-85%, 25-90%, 25-95%, 30-40%, 30-45%, 30-50%, 30-55%, 30-60%, 30-65%, 30-70%, 30-75%, 30-80%, 30-85%, 30-90%, 30-95%, 35-45%, 35-50%, 35-55%, 35-60%, 35-65%, 35-70%, 35-75%, 35-80%, 35-85%, 35-90%, 35-95%, 40-50%, 40-55%, 40-60%, 40-65%, 40-70%, 40-75%, 40-80%, 40-85%, 40-90%, 40-95%, 45-55%, 45-60%, 45-65%, 45-70%, 45-75%, 45-80%, 45-85%, 45-90%, 45-95%, 50-60%, 50-65%, 50-70%, 50-75%, 50-80%, 50-85%, 50-90%, 50-95%, 55-65%, 55-70%, 55-75%, 55-80%, 55-85%, 55-90%, 55-95%, 60-70%, 60-75%, 60-80%, 60-85%, 60-90%, 60-95%, 65-75%, 65-80%, 65-85%, 65-90%, 65-95%, 70-80%, 70-85%, 70-90%, 70-95%, 75-85%, 75-90%, 75-95%, 80-90%, 80-95%, or 90-95%.

[0246] In one embodiment, the TRACER AAV particles comprising a viral genome with a nucleic acid sequence encoding one or more siRNA molecules may be used to suppress a target protein in sensory neurons in order to treat neurological disease. Target protein in sensory neurons may be suppressed by 5%, 10%, 15%, 20%, 25%, 30%, 35%, 40%, 45%, 50%, 55%, 60%, 65%, 70%, 75%, 80%, 85%, 90%, 95%, or more than 95%, 5-15%, 5-20%, 5-25%, 5-30%, 5-35%, 5-40%, 5-45%, 5-50%, 5-55%, 5-60%, 5-65%, 5-70%, 5-75%, 5-80%, 5-85%, 5-90%, 5-95%, 10-20%, 10-25%, 10-30%, 10-35%, 10-40%, 10-45%, 10-50%, 10-55%, 10-60%, 10-65%, 10-70%, 10-75%, 10-80%, 10-85%, 10-90%, 10-95%, 15-25%, 15-30%, 15-35%, 15-40%, 15-45%, 15-50%, 15-55%, 15-60%, 15-65%, 15-70%, 15-75%, 15-80%, 15-85%, 15-90%, 15-95%, 20-30%, 20-35%, 20-40%, 20-45%, 20-50%, 20-55%, 20-60%, 20-65%, 20-70%, 20-75%, 20-80%, 20-85%, 20-90%, 20-95%, 25-35%, 25-40%, 25-45%, 25-50%, 25-55%, 25-60%, 25-65%, 25-70%, 25-75%, 25-80%, 25-85%, 25-90%, 25-95%, 30-40%, 30-45%, 30-50%, 30-55%, 30-60%, 30-65%, 30-70%, 30-75%, 30-80%, 30-85%, 30-90%, 30-95%, 35-45%, 35-50%, 35-55%, 35-60%, 35-65%, 35-70%, 35-75%, 35-80%, 35-85%, 35-90%, 35-95%, 40-50%, 40-55%, 40-60%, 40-65%, 40-70%, 40-75%, 40-80%, 40-85%, 40-90%, 40-95%, 45-55%, 45-60%, 45-65%, 45-70%, 45-75%, 45-80%, 45-85%, 45-90%, 45-95%, 50-60%, 50-65%, 50-70%, 50-75%, 50-80%, 50-85%, 50-90%, 50-95%, 55-65%, 55-70%, 55-75%, 55-80%, 55-85%, 55-90%, 55-95%, 60-70%, 60-75%, 60-80%, 60-85%, 60-90%, 60-95%, 65-75%, 65-80%, 65-85%, 65-90%, 65-95%, 70-80%, 70-85%, 70-90%, 70-95%, 75-85%, 75-90%, 75-95%, 80-90%, 80-95%, or 90-95%. Target protein in the sensory neurons may be reduced may be 5%, 10%, 15%, 20%, 25%, 30%, 35%, 40%, 45%, 50%, 55%, 60%, 65%, 70%, 75%, 80%, 85%, 90%, 95%, or more than 95%, 5-15%, 5-20%, 5-25%, 5-30%, 5-35%, 5-40%, 5-45%, 5-50%, 5-55%, 5-60%, 5-65%, 5- 70%, 5-75%, 5-80%, 5-85%, 5-90%, 5-95%, 10-20%, 10-25%, 10-30%, 10-35%, 10-40%, 10-45%, 10-50%, 10-55%, 10-60%, 10-65%, 10-70%, 10-75%, 10-80%, 10-85%, 10-90%, 10-95%, 15-25%, 15-30%, 15-35%, 15-40%, 15-45%, 15-50%, 15-55%, 15-60%, 15-65%, 15-70%, 15-75%, 15-80%, 15-85%, 15-90%, 15-95%, 20-30%, 20-35%, 20-40%, 20-45%, 20-50%, 20-55%, 20-60%, 20-65%, 20-70%, 20-75%, 20-80%, 20-85%, 20-90%, 20-95%, 25-35%, 25-40%, 25-45%, 25-50%, 25-55%, 25-60%, 25-65%, 25-70%, 25-75%, 25-80%, 25-85%, 25-90%, 25-95%, 30-40%, 30-45%, 30-50%, 30-55%, 30-60%, 30-65%, 30-70%, 30-75%, 30-80%, 30-85%, 30-90%, 30-95%, 35-45%, 35-50%, 35-55%, 35-60%, 35-65%, 35-70%, 35-75%, 35-80%, 35-85%, 35-90%, 35-95%, 40-50%, 40-55%, 40-60%, 40-65%, 40-70%, 40-75%, 40-80%, 40-85%, 40-90%, 40-95%, 45-55%, 45-60%, 45-65%, 45-70%, 45-75%, 45-80%, 45-85%, 45-90%, 45-95%, 50-60%, 50-65%, 50-70%, 50-75%, 50-80%, 50-85%, 50-90%, 50-95%, 55-65%, 55-70%, 55-75%, 55-80%, 55-85%, 55-90%, 55-95%, 60-70%, 60-75%, 60-80%, 60-85%, 60-90%, 60-95%, 65-75%, 65-80%, 65-85%, 65-90%, 65-95%, 70-80%, 70-85%, 70-90%, 70-95%, 75-85%, 75-90%, 75-95%, 80-90%, 80-95%, or 90-95%.

[0247] In one embodiment, the TRACER AAV particles comprising a viral genome with a nucleic acid sequence encoding one or more siRNA molecules may be used to suppress a target protein and reduce symptoms of neurological disease in a subject. The suppression of target protein and/or the reduction of symptoms of neurological disease may be, independently, reduced or suppressed by 5%, 10%, 15%, 20%, 25%, 30%, 35%, 40%, 45%, 50%, 55%, 60%, 65%, 70%, 75%, 80%, 85%, 90%, 95%, or more than 95%, 5-15%, 5-20%, 5-25%, 5-30%, 5-35%, 5-40%, 5-45%, 5-50%, 5-55%, 5-60%, 5-65%, 5-70%, 5-75%, 5-80%, 5-85%, 5-90%, 5-95%, 10-20%, 10-25%, 10-30%, 10-35%, 10-40%, 10-45%, 10-50%, 10-55%, 10-60%, 10-65%, 10-70%, 10-75%, 10-80%, 10-85%, 10-90%, 10-95%, 15-25%, 15-30%, 15-35%, 15-40%, 15-45%, 15-50%, 15-55%, 15-60%, 15-65%, 15-70%, 15-75%, 15-80%, 15-85%, 15-90%, 15-95%, 20-30%, 20-35%, 20-40%, 20-45%, 20-50%, 20-55%, 20-60%, 20-65%, 20-70%, 20-75%, 20-80%, 20-85%, 20-90%, 20-95%, 25-35%, 25-40%, 25-45%, 25-50%, 25-55%, 25-60%, 25-65%, 25-70%, 25-75%, 25-80%, 25-85%, 25-90%, 25-95%, 30-40%, 30-45%, 30-50%, 30-55%, 30-60%, 30-65%, 30-70%, 30-75%, 30-80%, 30-85%, 30-90%, 30-95%, 35-45%, 35-50%, 35-55%, 35-60%, 35-65%, 35-70%, 35-75%, 35-80%, 35-85%, 35-90%, 35-95%, 40-50%, 40-55%, 40-60%, 40-65%, 40-70%, 40-75%, 40-80%, 40-85%, 40-90%, 40-95%, 45-55%, 45-60%, 45-65%, 45-70%, 45-75%, 45-80%, 45-85%, 45-90%, 45-95%, 50-60%, 50-65%, 50-70%, 50-75%, 50-80%, 50-85%, 50-90%, 50-95%, 55-65%, 55-70%, 55-75%, 55-80%, 55-85%, 55-90%, 55-95%, 60-70%, 60-75%, 60-80%, 60-85%, 60-90%, 60-95%, 65-75%, 65-80%, 65-85%, 65-90%, 65-95%, 70-80%, 70-85%, 70-90%, 70-95%, 75-85%, 75-90%, 75-95%, 80-90%, 80-95%, or 90-95%.

[0248] In one embodiment, the TRACER AAV particles comprising a viral genome with a nucleic acid sequence encoding one or more siRNA molecules may be used to reduce the decline of functional capacity and activities of daily living as measured by a standard evaluation system such as, but not limited to, the total functional capacity (TFC) scale.

[0249] In some embodiments, the present composition is administered as a solo therapeutic or as combination therapeutic for the treatment of neurological disease.

[0250] The TRACER AAV particles comprising a viral genome with a nucleic acid sequence encoding one or more siRNA molecules may be used in combination with one or more other therapeutic agents. By “in combination with,” it is not intended to imply that the agents must be administered at the same time and/or formulated for delivery together, although these methods of delivery are within the scope of the present disclosure. Compositions can be administered concurrently with, prior to, or subsequent to, one or more other desired therapeutics or medical procedures. In general, each agent will be administered at a dose and/or on a time schedule determined for that agent.

[0251] Therapeutic agents that may be used in combination with the TRACER AAV particles comprising a viral genome with a nucleic acid sequence encoding one or more siRNA molecules can be small molecule compounds which are antioxidants, anti-inflammatory agents, anti-apoptosis agents, calcium regulators, antiglutamatergic agents, structural protein inhibitors, compounds involved in muscle function, and compounds involved in metal ion regulation.

[0252] Compounds tested for treating neurological disease which may be used in combination with the TRACER AAV particles comprising a viral genome with a nucleic acid sequence encoding one or more siRNA molecules include, but are not limited to, cholinesterase inhibitors (donepezil, rivastigmine, galantamine), NMDA receptor antagonists such as memantine, anti-psychotics, anti-depressants, anti-convulsants (e.g., sodium valproate and levetiracetam for myoclonus), secretase inhibitors, amyloid aggregation inhibitors, copper or zinc modulators, BACE inhibitors, inhibitors of tau aggregation, such as Methylene blue, phenothiazines, anthraquinones, n-phenylamines or rhodamines, microtubule stabilizers such as NAP, taxol or paclitaxel, kinase or phosphatase inhibitors such as those targeting GSK3β (lithium) or PP2A, immunization with Aβ peptides or tau phospho-epitopes, anti-tau or anti-amyloid antibodies, dopamine-depleting agents (e.g., tetrabenazine for chorea), benzodiazepines (e.g., clonazepam for myoclonus, chorea, dystonia, rigidity, and/or spasticity), amino acid precursors of dopamine (e.g., levodopa for rigidity), skeletal muscle relaxants (e.g., baclofen, tizanidine for rigidity and/or spasticity), inhibitors for acetylcholine release at the neuromuscular junction to cause muscle paralysis (e.g., botulinum toxin for bruxism and/or dystonia), atypical neuroleptics (e.g., olanzapine and quetiapine for psychosis and/or irritability, risperidone, sulpiride and haloperidol for psychosis, chorea and/or irritability, clozapine for treatment-resistant psychosis, aripiprazole for psychosis with prominent negative symptoms), selective serotonin reuptake inhibitors (SSRIs) (e.g., citalopram, fluoxetine, paroxetine, sertraline, mirtazapine, venlafaxine for depression, anxiety, obsessive compulsive behavior and/or irritability), hypnotics (e.g., xopiclone and/or zolpidem for altered sleep-wake cycle), anticonvulsants (e.g., sodium valproate and carbamazepine for mania or hypomania) and mood stabilizers (e.g., lithium for mania or hypomania).

[0253] Neurotrophic factors may be used in combination therapy with the TRACER AAV particles comprising a viral genome with a nucleic acid sequence encoding one or more siRNA molecules for treating neurological disease. Generally, a neurotrophic factor is defined as a substance that promotes survival, growth, differentiation, proliferation and/or maturation of a neuron, or stimulates increased activity of a neuron. In some embodiments, the present methods further comprise delivery of one or more trophic factors into the subject in need of treatment. Trophic factors may include, but are not limited to, IGF-I, GDNF, BDNF, CTNF, VEGF, Colivelin, Xaliproden, Thyrotrophin-releasing hormone and ADNF, and variants thereof.

[0254] In one aspect, the TRACER AAV particle encoding the nucleic acid sequence for the at least one siRNA duplex targeting the gene of interest may be co-administered with TRACER AAV particles expressing neurotrophic factors such as AAV-IGF-I (See e.g., Vincent et al., Neuromolecular medicine, 2004, 6, 79-85; the content of which is incorporated herein by reference in its entirety) and AAV-GDNF (See e.g., Wang et al., J Neurosci., 2002, 22, 6920-6928; the contents of which are incorporated herein by reference in their entirety).

[0255] In one embodiment, administration of the TRACER AAV particles to a subject will reduce the expression of a target protein in a subject and the reduction of expression of the target protein will reduce the effects and/or symptoms of neurological disease in a subject.

### Definitions

[0256] Adeno-associated virus: As used herein, the term “adeno-associated virus” or “AAV” refers to members of the dependovirus genus comprising any particle, sequence, gene, protein, or component derived therefrom.

[0257] AAV Particle: As used herein, an “AAV particle” is a virus which comprises a capsid and a viral genome with at least one payload region and at least one ITR. As used herein “AAV particles of the disclosure” are AAV particles comprising a parent capsid sequence with at least one targeting peptide insert. AAV particles of the present disclosure may be produced recombinantly and may be based on adeno-associated virus (AAV) parent or reference sequences. AAV particle may be derived from any serotype, described herein or known in the art, including combinations of serotypes (i.e., “pseudotyped” AAV) or from various genomes (e.g., single stranded or self-complementary). In addition, the AAV particle may be replication defective and/or targeted. In one embodiment, the AAV particle may have a targeting peptide inserted into the capsid to enhance tropism for a desired target tissue. It is to be understood that reference to the AAV particles of the disclosure also includes pharmaceutical compositions thereof, even if not explicitly recited.

[0258] Administering: As used herein, the term “administering” refers to providing a pharmaceutical agent or composition to a subject.

[0259] Amelioration: As used herein, the term “amelioration” or “ameliorating” refers to a lessening of severity of at least one indicator of a condition or disease. For example, in the context of neurodegeneration disorder, amelioration includes the reduction of neuron loss.

[0260] Animal: As used herein, the term “animal” refers to any member of the animal kingdom. In some embodiments, “animal” refers to humans at any stage of development. In some embodiments, “animal” refers to non-human animals at any stage of development. In certain embodiments, the non-human animal is a mammal (e.g., a rodent, a mouse, a rat, a rabbit, a monkey, a dog, a cat, a sheep, cattle, a primate, or a pig). In some embodiments, animals include, but are not limited to, mammals, birds, reptiles, amphibians, fish, and worms. In some embodiments, the animal is a transgenic animal, genetically engineered animal, or a clone.

[0261] Antisense strand: As used herein, the term “the antisense strand” or “the first strand” or “the guide strand” of a siRNA molecule refers to a strand that is substantially complementary to a section of about 10-50 nucleotides, e.g., about 15-30, 16-25, 18-23 or 19-22 nucleotides of the mRNA of a gene targeted for silencing. The antisense strand or first strand has sequence sufficiently complementary to the desired target mRNA sequence to direct target-specific silencing, e.g., complementarity sufficient to trigger the destruction of the desired target mRNA by the RNAi machinery or process.

[0262] Approximately: As used herein, the term “approximately” or “about,” as applied to one or more values of interest, refers to a value that is similar to a stated reference value. In certain embodiments, the term “approximately” or “about” refers to a range of values that fall within 25%, 20%, 19%, 18%, 17%, 16%, 15%, 14%, 13%, 12%, 11%, 10%, 9%, 8%, 7%, 6%, 5%, 4%, 3%, 2%, 1%, or less in either direction (greater than or less than) of the stated reference value unless otherwise stated or otherwise evident from the context (except where such number would exceed 100% of a possible value).

[0263] Capsid: As used herein, the term “capsid” refers to the protein shell of a virus particle.

[0264] Complementary and substantially complementary: As used herein, the term “complementary” refers to the ability of polynucleotides to form base pairs with one another. Base pairs are typically formed by hydrogen bonds between nucleotide units in antiparallel polynucleotide strands. Complementary polynucleotide strands can form base pairs in the Watson-Crick manner (e.g., A to T, A to U, C to G), or in any other manner that allows for the formation of duplexes. As persons skilled in the art are aware, when using RNA as opposed to DNA, uracil rather than thymine is the base that is considered to be complementary to adenine. However, when a U is denoted in the context of the present disclosure, the ability to substitute a T is implied, unless otherwise stated. Perfect complementarity or 100% complementarity refers to the situation in which each nucleotide unit of one polynucleotide strand can form a hydrogen bond with a nucleotide unit of a second polynucleotide strand. Less than perfect complementarity refers to the situation in which some, but not all, nucleotide units of two strands can form hydrogen bond with each other. For example, for two 20-mers, if only two base pairs on each strand can form a hydrogen bond with each other, the polynucleotide strands exhibit 10% complementarity. In the same example, if 18 base pairs on each strand can form hydrogen bonds with each other, the polynucleotide strands exhibit 90% complementarity. As used herein, the term “substantially complementary” means that the siRNA has a sequence (e.g., in the antisense strand) which is sufficient to bind the desired target mRNA, and to trigger the RNA silencing of the target mRNA.

[0265] Control Elements: As used herein, “control elements”, “regulatory control elements” or “regulatory sequences” refers to promoter regions, polyadenylation signals, transcription termination sequences, upstream regulatory domains, origins of replication, internal ribosome entry sites (“IRES”), enhancers, and the like, which provide for the replication, transcription and translation of a coding sequence in a recipient cell. Not all of these control elements need always be present as long as the selected coding sequence is capable of being replicated, transcribed and/or translated in an appropriate host cell.

[0266] Delivery: As used herein, “delivery” refers to the act or manner of delivering an AAV particle, a compound, substance, entity, moiety, cargo or payload.

[0267] Element: As used herein, the term “element” refers to a distinct portion of an entity. In some embodiments, an element may be a polynucleotide sequence with a specific purpose, incorporated into a longer polynucleotide sequence.

[0268] Encapsulate: As used herein, the term “encapsulate” means to enclose, surround or encase. As an example, a capsid protein often encapsulates a viral genome.

[0269] Engineered: As used herein, embodiments of the disclosure are “engineered” when they are designed to have a feature or property, whether structural or chemical, that varies from a starting point, wild type or native molecule.

[0270] Effective Amount: As used herein, the term “effective amount” of an agent is that amount sufficient to effect beneficial or desired results, for example, clinical results, and, as such, an “effective amount” depends upon the context in which it is being applied. For example, in the context of administering an agent that treats cancer, an effective amount of an agent is, for example, an amount sufficient to achieve treatment, as defined herein, of cancer, as compared to the response obtained without administration of the agent.

[0271] Expression: As used herein, “expression” of a nucleic acid sequence refers to one or more of the following events: (1) production of an RNA template from a DNA sequence (e.g., by transcription); (2) processing of an RNA transcript (e.g., by splicing, editing, 5′ cap formation, and/or 3′ end processing); (3) translation of an RNA into a polypeptide or protein; and (4) post-translational modification of a polypeptide or protein.

[0272] Feature: As used herein, a “feature” refers to a characteristic, a property, or a distinctive element.

[0273] Formulation: As used herein, a “formulation” includes at least one AAV particle (active ingredient) and an excipient, and/or an inactive ingredient.

[0274] Fragment: A “fragment,” as used herein, refers to a portion. For example, an antibody fragment may comprise a CDR, or a heavy chain variable region, or a scFv, etc.

[0275] Functional: As used herein, a “functional” biological molecule is a biological molecule in a form in which it exhibits a property and/or activity by which it is characterized.

[0276] Gene expression: The term “gene expression” refers to the process by which a nucleic acid sequence undergoes successful transcription and in most instances translation to produce a protein or peptide. For clarity, when reference is made to measurement of “gene expression”, this should be understood to mean that measurements may be of the nucleic acid product of transcription, e.g., RNA or mRNA or of the amino acid product of translation, e.g., polypeptides or peptides. Methods of measuring the amount or levels of RNA, mRNA, polypeptides and peptides are well known in the art.

[0277] Homology: As used herein, the term “homology” refers to the overall relatedness between polymeric molecules, e.g. between polynucleotide molecules (e.g. DNA molecules and/or RNA molecules) and/or between polypeptide molecules. In some embodiments, polymeric molecules are considered to be “homologous” to one another if their sequences are at least 25%, 30%, 35%, 40%, 45%, 50%, 55%, 60%, 65%, 70%, 75%, 80%, 85%, 90%, 95%, or 99% identical or similar. The term “homologous” necessarily refers to a comparison between at least two sequences (polynucleotide or polypeptide sequences). In accordance with the disclosure, two polynucleotide sequences are considered to be homologous if the polypeptides they encode are at least about 50%, 60%, 70%, 80%, 90%, 95%, or even 99% for at least one stretch of at least about 20 amino acids. In some embodiments, homologous polynucleotide sequences are characterized by the ability to encode a stretch of at least 4-5 uniquely specified amino acids. For polynucleotide sequences less than 60 nucleotides in length, homology is determined by the ability to encode a stretch of at least 4-5 uniquely specified amino acids. In accordance with the disclosure, two protein sequences are considered to be homologous if the proteins are at least about 50%, 60%, 70%, 80%, or 90% identical for at least one stretch of at least about 20 amino acids.

[0278] Identity: As used herein, the term “identity” refers to the overall relatedness between polymeric molecules, e.g., between polynucleotide molecules (e.g. DNA molecules and/or RNA molecules) and/or between polypeptide molecules. Calculation of the percent identity of two polynucleotide sequences, for example, can be performed by aligning the two sequences for optimal comparison purposes (e.g., gaps can be introduced in one or both of a first and a second nucleic acid sequences for optimal alignment and non-identical sequences can be disregarded for comparison purposes). In certain embodiments, the length of a sequence aligned for comparison purposes is at least 30%, at least 40%, at least 50%, at least 60%, at least 70%, at least 80%, at least 90%, at least 95%, or 100% of the length of the reference sequence. The nucleotides at corresponding nucleotide positions are then compared. When a position in the first sequence is occupied by the same nucleotide as the corresponding position in the second sequence, then the molecules are identical at that position. The percent identity between the two sequences is a function of the number of identical positions shared by the sequences, taking into account the number of gaps, and the length of each gap, which needs to be introduced for optimal alignment of the two sequences. The comparison of sequences and determination of percent identity between two sequences can be accomplished using a mathematical algorithm. For example, the percent identity between two nucleotide sequences can be determined using methods such as those described in Computational Molecular Biology, Lesk, A. M., ed., Oxford University Press, New York, 1988; Biocomputing: Informatics and Genome Projects, Smith, D. W., ed., Academic Press, New York, 1993; Sequence Analysis in Molecular Biology, von Heinje, G., Academic Press, 1987; Computer Analysis of Sequence Data, Part I, Griffin, A. M., and Griffin, H. G., eds., Humana Press, New Jersey, 1994; and Sequence Analysis Primer, Gribskov, M. and Devereux, J., eds., M Stockton Press, New York, 1991; the contents of each of which are incorporated herein by reference in their entirety. For example, the percent identity between two nucleotide sequences can be determined using the algorithm of Meyers and Miller (CABIOS, 1989, 4:11-17), which has been incorporated into the ALIGN program (version 2.0) using a PAM120 weight residue table, a gap length penalty of 12 and a gap penalty of 4. The percent identity between two nucleotide sequences can, alternatively, be determined using the GAP program in the GCG software package using an NWSgapdna.CMP matrix. Methods commonly employed to determine percent identity between sequences include, but are not limited to those disclosed in Carillo, H., and Lipman, D., SIAM J Applied Math., 48:1073 (1988); incorporated herein by reference. Techniques for determining identity are codified in publicly available computer programs. Exemplary computer software to determine homology between two sequences include, but are not limited to, GCG program package, Devereux, J., et al., Nucleic Acids Research, 12(1), 387 (1984)), BLASTP, BLASTN, and FASTA Altschul, S. F. et al., J. Molec. Biol., 215, 403 (1990)).

[0279] Inhibit expression of a gene: As used herein, the phrase “inhibit expression of a gene” means to cause a reduction in the amount of an expression product of the gene. The expression product can be an RNA transcribed from the gene (e.g., an mRNA) or a polypeptide translated from an mRNA transcribed from the gene. Typically, a reduction in the level of an mRNA results in a reduction in the level of a polypeptide translated therefrom. The level of expression may be determined using standard techniques for measuring mRNA or protein.

[0280] Insert: As used herein the term “insert” may refer to the addition of a targeting peptide sequence to a parent AAV capsid sequence. An “insertion” may result in the replacement of one or more amino acids of the parent AAV capsid sequence. Alternatively, an insertion may result in no changes to the parent AAV capsid sequence beyond the addition of the targeting peptide sequence.

[0281] Inverted terminal repeat: As used herein, the term “inverted terminal repeat” or “ITR” refers to a cis-regulatory element for the packaging of polynucleotide sequences into viral capsids.

[0282] Library: As used herein, the term “library” refers to a diverse collection of linear polypeptides, polynucleotides, viral particles, or viral vectors. As examples, a library may be a DNA library or an AAV capsid library.

[0283] Neurological disease: As used herein, a “neurological disease” is any disease associated with the central or peripheral nervous system and components thereof (e.g., neurons).

[0284] Naturally Occurring: As used herein, “naturally occurring” or “wild-type” means existing in nature without artificial aid, or involvement of the hand of man.

[0285] Open reading frame: As used herein, “open reading frame” or “ORF” refers to a sequence which does not contain a stop codon in a given reading frame.

[0286] Parent sequence: As used herein, a “parent sequence” is a nucleic acid or amino acid sequence from which a variant is derived. In one embodiment, a parent sequence is a sequence into which a heterologous sequence is inserted. In other words, a parent sequence may be considered an acceptor or recipient sequence. In one embodiment, a parent sequence is an AAV capsid sequence into which a targeting sequence is inserted.

[0287] Particle: As used herein, a “particle” is a virus comprised of at least two components, a protein capsid and a polynucleotide sequence enclosed within the capsid.

[0288] Patient: As used herein, “patient” refers to a subject who may seek or be in need of treatment, requires treatment, is receiving treatment, will receive treatment, or a subject who is under care by a trained professional for a particular disease or condition.

[0289] Payload region: As used herein, a “payload region” is any nucleic acid sequence (e.g., within the viral genome) which encodes one or more “payloads” of the disclosure. As non-limiting examples, a payload region may be a nucleic acid sequence within the viral genome of an AAV particle, which encodes a payload, wherein the payload is an RNAi agent or a polypeptide. Payloads of the present disclosure may be, but are not limited to, peptides, polypeptides, proteins, antibodies, RNAi agents, etc.

[0290] Peptide: As used herein, “peptide” is less than or equal to 50 amino acids long, e.g., about 5, 10, 15, 20, 25, 30, 35, 40, 45, or 50 amino acids long.

[0291] Pharmaceutically acceptable: The phrase “pharmaceutically acceptable” is employed herein to refer to those compounds, materials, compositions, and/or dosage forms which are, within the scope of sound medical judgment, suitable for use in contact with the tissues of human beings and animals without excessive toxicity, irritation, allergic response, or other problem or complication, commensurate with a reasonable benefit/risk ratio.

[0292] Preventing: As used herein, the term “preventing” or “prevention” refers to partially or completely delaying onset of an infection, disease, disorder and/or condition; partially or completely delaying onset of one or more symptoms, features, or clinical manifestations of a particular infection, disease, disorder, and/or condition; partially or completely delaying onset of one or more symptoms, features, or manifestations of a particular infection, disease, disorder, and/or condition; partially or completely delaying progression from an infection, a particular disease, disorder and/or condition; and/or decreasing the risk of developing pathology associated with the infection, the disease, disorder, and/or condition.

[0293] Prophylactic: As used herein, “prophylactic” refers to a therapeutic or course of action used to prevent the spread of disease.

[0294] Prophylaxis: As used herein, a “prophylaxis” refers to a measure taken to maintain health and prevent the spread of disease.

[0295] Region: As used herein, the term “region” refers to a zone or general area. In some embodiments, when referring to a protein or protein module, a region may comprise a linear sequence of amino acids along the protein or protein module or may comprise a three-dimensional area, an epitope and/or a cluster of epitopes. In some embodiments, regions comprise terminal regions. As used herein, the term “terminal region” refers to regions located at the ends or termini of a given agent. When referring to proteins, terminal regions may comprise N- and/or C-termini.

[0296] In some embodiments, when referring to a polynucleotide, a region may comprise a linear sequence of nucleic acids along the polynucleotide or may comprise a three-dimensional area, secondary structure, or tertiary structure. In some embodiments, regions comprise terminal regions. As used herein, the term “terminal region” refers to regions located at the ends or termini of a given agent. When referring to polynucleotides, terminal regions may comprise 5′ and/or 3′ termini.

[0297] RNA or RNA molecule: As used herein, the term “RNA” or “RNA molecule” or “ribonucleic acid molecule” refers to a polymer of ribonucleotides; the term “DNA” or “DNA molecule” or “deoxyribonucleic acid molecule” refers to a polymer of deoxyribonucleotides. DNA and RNA can be synthesized naturally, e.g., by DNA replication and transcription of DNA, respectively; or be chemically synthesized. DNA and RNA can be single-stranded (i.e., ssRNA or ssDNA, respectively) or multi-stranded (e.g., double stranded, i.e., dsRNA and dsDNA, respectively). The term “mRNA” or “messenger RNA”, as used herein, refers to a single stranded RNA that encodes the amino acid sequence of one or more polypeptide chains.

[0298] RNA interfering or RNAi: As used herein, the term “RNA interfering” or “RNAi” refers to a sequence specific regulatory mechanism mediated by RNA molecules which results in the inhibition or interfering or “silencing” of the expression of a corresponding protein-coding gene. RNAi has been observed in many types of organisms, including plants, animals and fungi. RNAi occurs in cells naturally to remove foreign RNAs (e.g., viral RNAs). Natural RNAi proceeds via fragments cleaved from free dsRNA which direct the degradative mechanism to other similar RNA sequences. RNAi is controlled by the RNA-induced silencing complex (RISC) and is initiated by short/small dsRNA molecules in cell cytoplasm, where they interact with the catalytic RISC component argonaute. The dsRNA molecules can be introduced into cells exogenously. Exogenous dsRNA initiates RNAi by activating the ribonuclease protein Dicer, which binds and cleaves dsRNAs to produce double-stranded fragments of 21-25 base pairs with a few unpaired overhang bases on each end. These short double stranded fragments are called small interfering RNAs (siRNAs).

[0299] RNAi agent: As used herein, the term “RNAi agent” refers to an RNA molecule, or its derivative, that can induce inhibition, interfering, or “silencing” of the expression of a target gene and/or its protein product. An RNAi agent may knock-out (virtually eliminate or eliminate) expression, or knock-down (lessen or decrease) expression. The RNAi agent may be, but is not limited to, dsRNA, siRNA, shRNA, pre-miRNA, pri-miRNA, miRNA, stRNA, lncRNA, piRNA, or snoRNA.

[0300] Sample: As used herein, the term “sample” or “biological sample” refers to a subset of its tissues, cells or component parts (e.g. body fluids, including but not limited to blood, serum, mucus, lymphatic fluid, synovial fluid, cerebrospinal fluid, saliva, amniotic fluid, amniotic cord blood, urine, vaginal fluid and semen). A sample further may include a homogenate, lysate or extract prepared from a whole organism or a subset of its tissues, cells or component parts, or a fraction or portion thereof, including but not limited to, for example, plasma, serum, spinal fluid, lymph fluid, the external sections of the skin, respiratory, intestinal, and genitourinary tracts, tears, saliva, milk, blood cells, tumors, organs. A sample further refers to a medium, such as a nutrient broth or gel, which may contain cellular components, such as proteins or nucleic acid molecule.

[0301] Self-complementary viral particle: As used herein, a “self-complementary viral particle” is a particle comprised of at least two components, a protein capsid and a self-complementary viral genome enclosed within the capsid.

[0302] Sense Strand: As used herein, the term “the sense strand” or “the second strand” or “the passenger strand” of a siRNA molecule refers to a strand that is complementary to the antisense strand or first strand. The antisense and sense strands of a siRNA molecule are hybridized to form a duplex structure. As used herein, a “siRNA duplex” includes a siRNA strand having sufficient complementarity to a section of about 10-50 nucleotides of the mRNA of the gene targeted for silencing and a siRNA strand having sufficient complementarity to form a duplex with the other siRNA strand.

[0303] Similarity: As used herein, the term “similarity” refers to the overall relatedness between polymeric molecules, e.g. between polynucleotide molecules (e.g. DNA molecules and/or RNA molecules) and/or between polypeptide molecules. Calculation of percent similarity of polymeric molecules to one another can be performed in the same manner as a calculation of percent identity, except that calculation of percent similarity takes into account conservative substitutions as is understood in the art.

[0304] Short interfering RNA or siRNA: As used herein, the terms “short interfering RNA,” “small interfering RNA” or “siRNA” refer to an RNA molecule (or RNA analog) comprising between about 5-60 nucleotides (or nucleotide analogs) which is capable of directing or mediating RNAi. Preferably, a siRNA molecule comprises between about 15-30 nucleotides or nucleotide analogs, such as between about 16-25 nucleotides (or nucleotide analogs), between about 18-23 nucleotides (or nucleotide analogs), between about 19-22 nucleotides (or nucleotide analogs) (e.g., 19, 20, 21 or 22 nucleotides or nucleotide analogs), between about 19-25 nucleotides (or nucleotide analogs), and between about 19-24 nucleotides (or nucleotide analogs). The term “short” siRNA refers to a siRNA comprising 5-23 nucleotides, preferably 21 nucleotides (or nucleotide analogs), for example, 19, 20, 21 or 22 nucleotides. The term “long” siRNA refers to a siRNA comprising 24-60 nucleotides, preferably about 24-25 nucleotides, for example, 23, 24, 25 or 26 nucleotides. Short siRNAs may, in some instances, include fewer than 19 nucleotides, e.g., 16, 17 or 18 nucleotides, or as few as 5 nucleotides, provided that the shorter siRNA retains the ability to mediate RNAi. Likewise, long siRNAs may, in some instances, include more than 26 nucleotides, e.g., 27, 28, 29, 30, 35, 40, 45, 50, 55, or even 60 nucleotides, provided that the longer siRNA retains the ability to mediate RNAi or translational repression absent further processing, e.g., enzymatic processing, to a short siRNA. siRNAs can be single stranded RNA molecules (ss-siRNAs) or double stranded RNA molecules (ds-siRNAs) comprising a sense strand and an antisense strand which hybridized to form a duplex structure called an siRNA duplex.

[0305] Subject: As used herein, the term “subject” or “patient” refers to any organism to which a composition in accordance with the disclosure may be administered, e.g., for experimental, diagnostic, prophylactic, and/or therapeutic purposes. Typical subjects include animals (e.g., mammals such as mice, rats, rabbits, non-human primates, and humans) and/or plants.

[0306] Substantially: As used herein, the term “substantially” refers to the qualitative condition of exhibiting total or near-total extent or degree of a characteristic or property of interest. One of ordinary skill in the biological arts will understand that biological and chemical phenomena rarely, if ever, go to completion and/or proceed to completeness or achieve or avoid an absolute result. The term “substantially” is therefore used herein to capture the potential lack of completeness inherent in many biological and chemical phenomena.

[0307] Targeting peptide: As used herein, a “targeting peptide” refers to a peptide of 3-20 amino acids in length. These targeting peptides may be inserted into, or attached to, a parent amino acid sequence to alter the characteristics (e.g., tropism) of the parent protein. As a non-limiting example, the targeting peptide can be inserted into an AAV capsid sequence for enhanced targeting to a desired cell-type, tissue, organ or organism. It is to be understood that a targeting peptide is encoded by a targeting polynucleotide which may similarly be inserted into a parent polynucleotide sequence. Therefore, a “targeting sequence” refers to a peptide or polynucleotide sequence for insertion into an appropriate parent sequence (amino acid or polynucleotide, respectively).

[0308] Target Cells: As used herein, “target cells” or “target tissue” refers to any one or more cells of interest. The cells may be found in vitro, in vivo, in situ or in the tissue or organ of an organism. The organism may be an animal, preferably a mammal, more preferably a human and most preferably a patient.

[0309] Therapeutic Agent: The term “therapeutic agent” refers to any agent that, when administered to a subject, has a therapeutic, diagnostic, and/or prophylactic effect and/or elicits a desired biological and/or pharmacological effect.

[0310] Therapeutically effective amount: As used herein, the term “therapeutically effective amount” means an amount of an agent to be delivered (e.g., nucleic acid, drug, therapeutic agent, diagnostic agent, prophylactic agent, etc.) that is sufficient, when administered to a subject suffering from or susceptible to an infection, disease, disorder, and/or condition, to treat, improve symptoms of, diagnose, prevent, and/or delay the onset of the infection, disease, disorder, and/or condition. In some embodiments, a therapeutically effective amount is provided in a single dose.

[0311] Therapeutically effective outcome: As used herein, the term “therapeutically effective outcome” means an outcome that is sufficient in a subject suffering from or susceptible to an infection, disease, disorder, and/or condition, to treat, improve symptoms of, diagnose, prevent, and/or delay the onset of the infection, disease, disorder, and/or condition.

[0312] Treating: As used herein, the term “treating” refers to partially or completely alleviating, ameliorating, improving, relieving, delaying onset of, inhibiting progression of, reducing severity of, and/or reducing incidence of one or more symptoms or features of a particular infection, disease, disorder, and/or condition. For example, “treating” cancer may refer to inhibiting survival, growth, and/or spread of a tumor. Treatment may be administered to a subject who does not exhibit signs of a disease, disorder, and/or condition and/or to a subject who exhibits only early signs of a disease, disorder, and/or condition for the purpose of decreasing the risk of developing pathology associated with the disease, disorder, and/or condition.

[0313] Vector: As used herein, the term “vector” refers to any molecule or moiety which transports, transduces or otherwise acts as a carrier of a heterologous molecule. In some embodiments, vectors may be plasmids. In some embodiments, vectors may be viruses. An AAV particle is an example of a vector. Vectors of the present disclosure may be produced recombinantly and may be based on and/or may comprise adeno-associated virus (AAV) parent or reference sequences. The heterologous molecule may be a polynucleotide and/or a polypeptide.

[0314] Viral Genome: As used herein, the terms “viral genome” or “vector genome” refer to the nucleic acid sequence(s) encapsulated in an AAV particle. A viral genome comprises a nucleic acid sequence with at least one payload region encoding a payload and at least one ITR.

### EQUIVALENTS AND SCOPE

[0315] Those skilled in the art will recognize or be able to ascertain using no more than routine experimentation, many equivalents to the specific embodiments in accordance with the disclosure described herein. The scope of the present disclosure is not intended to be limited to the above Description, but rather is as set forth in the appended claims.

[0316] In the claims, articles such as “a,” “an,” and “the” may mean one or more than one unless indicated to the contrary or otherwise evident from the context. Claims or descriptions that include “or” between one or more members of a group are considered satisfied if one, more than one, or all of the group members are present in, employed in, or otherwise relevant to a given product or process unless indicated to the contrary or otherwise evident from the context. The disclosure includes embodiments in which exactly one member of the group is present in, employed in, or otherwise relevant to a given product or process. The disclosure includes embodiments in which more than one, or the entire group members are present in, employed in, or otherwise relevant to a given product or process.

[0317] It is also noted that the term “comprising” is intended to be open and permits but does not require the inclusion of additional elements or steps. When the term “comprising” is used herein, the term “consisting of” is thus also encompassed and disclosed.

[0318] Where ranges are given, endpoints are included. Furthermore, it is to be understood that unless otherwise indicated or otherwise evident from the context and understanding of one of ordinary skill in the art, values that are expressed as ranges can assume any specific value or subrange within the stated ranges in different embodiments of the disclosure, to the tenth of the unit of the lower limit of the range, unless the context clearly dictates otherwise.

[0319] In addition, it is to be understood that any particular embodiment of the present disclosure that falls within the prior art may be explicitly excluded from any one or more of the claims. Since such embodiments are deemed to be known to one of ordinary skill in the art, they may be excluded even if the exclusion is not set forth explicitly herein. Any particular embodiment of the compositions of the disclosure (e.g., any antibiotic, therapeutic or active ingredient; any method of production; any method of use; etc.) can be excluded from any one or more claims, for any reason, whether or not related to the existence of prior art.

[0320] It is to be understood that the words which have been used are words of description rather than limitation, and that changes may be made within the purview of the appended claims without departing from the true scope and spirit of the disclosure in its broader aspects.

[0321] While the present disclosure has been described at some length and with some particularity with respect to the several described embodiments, it is not intended that it should be limited to any such particulars or embodiments or any particular embodiment, but it is to be construed with references to the appended claims so as to provide the broadest possible interpretation of such claims in view of the prior art and, therefore, to effectively encompass the intended scope of the disclosure.

[0322] The present disclosure is further illustrated by the following non-limiting examples.

### EXAMPLES

### Example 1. TRACER Proof of Concept: Promoter Selection

[0323] Proof-of-concept experiments were conducted by placing the genes encoding an AAV9 peptide display capsid library under the control of either the neuron-specific synapsin promoter (SYN) or the astrocyte-specific GFAP promoter. Following intravenous administration to C57BL/6 mice, RNA was recovered from brain tissue and used for further library evolution. Next-generation sequencing (NGS) showed sequence convergence between animals after only two rounds of selection. Interestingly, several variants highly similar to the PHP.eB capsid were recovered, suggesting that our method allowed a rapid selection of high-performance capsids. A subset of capsids having peptide sequences with high CNS enrichment was selected for further study. It is understood that any promoter may be selected depending on the desired tropism. Examples of such promoters are found in Table 3.

TABLE 3
Promoters, tissue and cell type

| Promoter name | Tissue | Cell type |
|---|---|---|
| B29 promoter | Blood | B cells |
| Immunoglobulin heavy chain | Blood | B cells |
| promoter | | |
| CD45 promoter | Blood | Hematopoietic |
| Mouse INF-β promoter | Blood | Hematopoietic |
| CD45 SV40/CD45 promoter | Blood | Hematopoietic |
| WASP promoter | Blood | Hematopoietic |
| CD43 promoter | Blood | Leuko & Platelets |
| CD43 SV40/CD43 promoter | Blood | Leuko & Platelets |
| CD68 promoter | Blood | Macrophages |
| GPIIb promoter | Blood | Megakaryocyte |
| CD14 promoter | Blood | Monocytes |
| CD2 promoter | Blood | T cells |
| Osteocalcin | Bone | Osteoblasts |
| Bone sialoprotein | Bone | Osteoblasts |
| OG-2 promoter | Bone | Osteoblasts, odontoblasts |
| GFAP promoter | Brain | Astrocytes |
| Vga | Brain | GABAergic neurons |
| Vglut2 | Brain | glutamatergic neurons |
| NSE/RU5′ promoter | Brain | Neurons |
| SYN1 promoter | Brain | Neurons |
| Neurofilament light chain | Brain | Neurons |
| VGF | Brain | Neurons |
| Nestin | Brain | NSC |
| Chx10 | Eye | All retinal neurons |
| PrP | Eye | All retinal neurons |
| Dkk3 | Eye | All retinal neurons |
| Math5 | Eye | Amacrine and horizontal |
| | | cells |
| Ptf1a | Eye | Amacrine and horizontal |
| | | cells |
| Pcp2 | Eye | Bipolar cells |
| Nefh | Eye | Ganglion cells |
| gamma-synuclein gene | Eye | ganglion cells |
| (SNCG) | | |
| Grik4 | Eye | GC |
| Pdgfra | Eye | GC and ONL Müller cells |
| Chat | Eye | GC/Amacrine cells |
| Thy1.2 | Eye | GC/neural retina |
| hVmd2 | Eye | INL Müller cells |
| Thy1 | Eye | INL Müller cells |
| Modified αA-crystallin | Eye | Lens/neural retina |
| hRgp | Eye | M- and S-cone |
| mMo | Eye | M-cone |
| Opn4 | Eye | Melanopsin-expressing GC |
| RLBP1 | Eye | Muller cells |
| Glast | Eye | Müller cells |
| Foxg1 | Eye | Müller cells |
| hVmd2 | Eye | Müller cells/optic nerve/ |
| | | INL |
| Trp1 | Eye | Neural retina |
| Six3 | Eye | Neural retina |
| cx36 | Eye | Neurons |
| Grm6-SV40 eukaryotic | Eye | ON bipolar |
| promoter | | |
| hVmd2 | Eye | Optic nerve |
| Dct | Eye | Pigmented cells |
| Rpc65 | Eye | Retinal pigment epithelium |
| mRho | Eye | Rod |
| Irbp | Eye | Rod |
| hRho | Eye | Rod |
| Pcp2 | Eye | Rod bipolar cells |
| Rhodopsin | Eye | Rod Photoreceptors |
| mSo | Eye | S-cone |
| MLC2v promoter | Heart | Cardiomyocyte |
| αMHC promoter | Heart | Cardiomyocyte |
| rat troponin T (Tnnt2) | Heart | Cardiomyocyte |
| Tie2 | Heart | Endothelial |
| Tcf21 | Heart | Fibroblasts |
| ECAD | Kidney | Collecting duct |
| NKCC2 | Kidney | Loop of Henle |
| KSPC | Kidney | Nephron |
| NPHS1 | Kidney | Podocyte |
| SGLT2 | Kidney | Proximal tubular cells |
| SV40/bAlb promoter | Liver | hepatocytes |
| SV40/hAlb promoter | Liver | hepatocytes |
| Hepatitis B virus core | Liver | hepatocytes |
| promoter | | |
| Alpha fetoprotein | Liver | hepatocytes |
| Surfactant protein B promoter | Lung | AT II cells and Clara cells |
| Surfactant protein C promoter | Lung | AT II cells and Clara cells |
| Desmin | Muscle | Muscle stem cells + |
| | | Myocytes |
| Mb promoter | Muscle | Myocyte |
| Myosin | Muscle | Myocyte |
| Dystrophin | Muscle | Myocyte |
| dMCK and tMCK | Muscle | Myocytes |
| Elastase-1 promoter | Pancreas | Acinar cells |
| PDX1 promoter | Pancreas | Beta cells |
| Insulin promoter | Pancreas | langherans |
| Slco1c1 | Vasculature | BBB Endothelial |
| tie | Vasculature | Endothelial |
| cadherin | Vasculature | Endothelial |
| ICAM-2 | Vasculature | Endothelial |
| claudin 1 | Vasculature | Endothelial |
| Cldn5 | Vasculature | Endothelial |
| Flt-1 promoter | Vasculature | Endothelial |
| Endoglin promoter | Vasculature | Endothelial |

[0324] Capsid pools were injected to three rodent species, followed by RNA enrichment analysis for characterization of transduction efficiency in neurons or astrocytes and cross-species performance. Top-ranking capsids were then individually tested and several variants showed CNS transduction similar to or higher than the PHP.eB benchmark. These results suggest that the TRACER platform allows rapid in vivo evolution of AAV capsids in non-transgenic animals with a high degree of tropism improvement. The following examples illustrate the findings in more detail.

### Example 2. Generation of an AAV Vectors Capable of Capsid mRNA Expression in the Absence of Helper Virus

[0325] In order to perform cell type- and transduction-restricted in vivo evolution of AAV capsid libraries, a capsid library system was engineered in which the capsid mutant gene can be transcribed in the absence of a helper virus, in a specific cell type. In the wild-type AAV virus, the mRNA encoding the capsid proteins VP1, VP2 and VP3, as well as the AAP accessory protein, are expressed by the P40 promoter located in the 3′ region of the REP gene (FIG. 1A), that is only active in the presence of the REP protein as well as the helper virus functions (Berns et al., 1996). In order to allow expression of the capsid mRNA in animal tissue or in cultured cells, another promoter must be inserted upstream or downstream of the CAP gene. Because of the limited packaging capacity of the AAV capsid, a portion of the REP gene must be deleted to accommodate the extra promoter insertion, and the REP gene has to be provided in trans by another plasmid to allow virus production. The minimal viral sequence required for high titer AAV production was determined by introducing a CMV promoter at various locations upstream of the CAP gene of AAV9 (FIG. 1B). The REP protein was provided in trans by the pREP2 plasmid obtained by deleting the CAP gene from a REP2-CAP2 packaging vector using EcoNI and ClaI (SEQ. ID NO: 4). For small-scale virus production test, HEK-293T cells grown in DMEM supplemented with 5% FBS and 1× pen/strep were plated in 15-cm dishes and co-transfected with 15 ug of pHelper (pFdelta6) plasmid, 10 ug pREP2 plasmid and 1 ug ITR-CMV-CAP plasmid using calcium phosphate transfection. After 72 hours, cells were harvested by scraping, pelleted by a brief centrifugation and suspended in 1 ml of a buffer containing 10 mM Tris and 2 mM MgCl2. Cells were lysed by addition of triton X-100 to 0.1% final concentration and treated with 50U of benzonase for 1 hour. Virus from the supernatants was precipitated with 8% polyethylene glycol and 0.5M NaCl, suspended in 1 ml of 10 mM TRIS-2 mM MgCl2 and combined with the cell lysate. The pooled virus was adjusted to 0.5M NaCl, cleared by centrifugation for 15 minutes at 4,000×g and fractionated on a step iodixanol gradient of 15%, 25%, 40% and 60% for 3 hours at 40,000 prm (Zolotukhin et al., 1999). The 40% fraction containing the purified AAV particles was harvested and viral titers were measured by real-time PCR using a Taqman primer/probe mix specific for the 3′-end of REP, shared by all the constructs. Virus yields were significantly lower than the fully wild-type ITR-REP2-CAP9-ITR used as a reference (1.7% to 8.8%), but the CMV-BstEII construct allowed the highest yields of all three CMV constructs. See FIG. 2. The CMV-HindIII construct, in which most of the P40 promoter sequence is deleted, generated the lowest yield (1.7% of wtAAV9), indicating that even the potent CMV promoter cannot replace the P40 promoter without a severe drop in virus yields. Following these observations, the BstEII architecture (SEQ. ID NO: 5), which preserves the minimal P40 sequence and the CAP mRNA splice donor, was used in all further experiments.

[0326] The REP-expressing plasmid was then improved by preserving the AAP reading frame together with a large portion of the capsid gene from the REP2-CAP9 helper vector, which may contain sequences necessary for the regulation of CAP transcription and/or splicing. In order to eliminate the capsid coding potential of the vector, a C-terminus fragment of the capsid gene was deleted by a triple cut with the MscI restriction enzyme followed by self-ligation, in order to obtain the pREP-AAP plasmid (FIG. 3A, SEQ. ID NO: 6).

[0327] An iteration of this construct was engineered by introducing premature stop codons immediately after the start codons of VP1, VP2 and VP3, without perturbing the amino acid sequence of the colinear AAP reading frame (FIG. 3A). This construct was named pREP-3stop (SEQ. ID NO: 7). A neuron-specific syn-CAP9 vector (SEQ. ID NO: 8) was derived from the CMV9-BstEII plasmid by swapping the CMV promoter with the neuron-specific human synapsin 1 promoter.

[0328] Production efficiency of this Syn-CAP9 was tested as described previously using PREP, pREP-AAP or pREP-3stop plasmid to supply REP in trans. As shown in FIG. 3B, the REP plasmids harboring a longer capsid sequence as well as AAP increased virus yields by approximately 3-fold compared to the pREP plasmid. Virus titers obtained with the pREP-AAP or pREP-3stop vectors reached ˜30% of wild-type AAV9. An important concern with plasmids harboring long homologous regions is the potential for unwanted recombination with the ITR-CAP vector, that would reconstitute a wild-type ITR-REP-CAP vector and contaminate combinatorial libraries.

[0329] To evaluate the risk of wild-type virus reconstitution, the viral preparations obtained in FIG. 3B were subjected to real-time PCR with a Taqman probe located in the N terminus of REP. The percentage of capsids containing a detectable full-length REP was less than 0.03% of wild-type virus (FIG. 3C), which was even lower than the routinely detected 0.1% illegitimate REP-CAP packaging occurring in most recombinant AAV preparations obtained from 293T cell transfection (FIG. 3C, our unpublished observations). Because the premature stop codons of the pREP-3stop vector offer an extra layer of safety against potential reconstitution of wild-type capsids and prevents the translation of truncated capsid proteins, the 3stop plasmid was used for all subsequent studies.

[0330] Following this, the feasibility of RNA-driven biopanning in C57BL/6 mice using AAV9-packaged vectors where the AAV9 capsid gene is driven by the CMV promoter, the Synapsin promoter or the astrocyte-specific GFabc1D promoter (SEQ. ID NO: 9), thereafter referred to as GFAP promoter (Brenner et al., 2008) was tested (FIG. 4A). The three vectors were produced in HEK-293T cells as previously described and analyzed by PAGE-silver stain. As shown in FIG. 4B, all vectors showed a normal ratio of VP1, VP2 and VP3 capsid proteins, indicating that the particular promoter architecture does not disrupt the balance of capsid protein expression. Six-week old male C57BL/6 mice were injected intravenously with 1e12 VG per mouse and sacrificed after 28 days. DNA biodistribution and capsid mRNA expression were tested in the brain, liver and heart tissues.

[0331] Total DNA was extracted from brain, liver and heart tissues using Qiagen DNeasy Blood and Tissue columns, and viral DNA was quantified by real-time PCR using a Taqman probe located in the VP3 N-terminal region. DNA abundance was normalized using a pre-designed probe detecting the single-copy transferrin receptor gene (Life Technologies ref. 4458366). Viral DNA was highly abundant in the liver and to a lower extent in the heart. The DNA distribution did not show any noticeable difference between the three vectors (FIG. 4C). RNA was extracted with Qiagen RNeasy plus universal kit following manufacturer's instructions, then treated with ezDNAse (Qiagen) to remove residual DNA, and reverse transcribed with Superscript IV (Life technologies).

[0332] RNA expression was evaluated using the same VP3 probe used to quantify viral DNA and normalized using TBP as a reference RNA (Life technologies Mm01277042_m1). In the brain, the GFAP promoter allowed the strongest expression level, and the Synapsin promoter allowed a comparable expression as the potent CMV promoter. In the liver, all promoters resulted in a similar expression level, which could be the result of a leaky expression at very high copy number (FIG. 4D). In the heart, the cell type specificity of the Syn and GFAP promoters was evident, since they allowed only ˜3 and 10% of CMV expression, respectively despite of a similar DNA biodistribution.

[0333] Overall the experiment showed that mRNA from transduction-competent capsids could be recovered from various animal organs, including weakly transduced tissues such as the brain.

### Example 3. AAV Vector Configuration

[0334] Various vector configurations were explored toward increasing RNA expression to maximize library recovery. The CMV promoter was replaced by a hybrid CMV enhancer/Chicken beta-actin promoter sequence (Niwa et al., 1991) and a potent cytomegalovirus-beta-globin hybrid intron derived from the AAV-MCS cloning vector (Stratagene) was inserted between the promoter sequence and the capsid gene, as introns have been shown to increase mRNA processing and stability (Powell et al., 2015). This resulted in the constructs CAG9 (SEQ. ID NO: 10), SYNG9 (SEQ. ID NO: 11) and GFAPG (SEQ. ID NO: 12).

[0335] An inverted vector configuration was also tested where the helper-independent promoter was placed downstream of the capsid gene in reverse orientation, in order to avoid potential interference with the P40 promoter (FIG. 5A). This configuration allows the expression of an antisense capsid transcript in animal tissue. Because most polyadenylation signals (AATAAA) are orientation-dependent, it was hypothesized that the natural AAV capsid polyA would not prematurely terminate transcription when placed in reverse orientation. All constructs were co-transfected with pHelper and pREP-3stop plasmids to generate AAV9-packaged virions that were used to transduce HEK-293T cells at a MOI of 1e4 VG per cell. RNA was extracted 48 hours post-transfection and reverse transcribed using the Quantitect kit (Qiagen).

[0336] PCR was performed with primers allowing amplification of the full-length capsid or a partial sequence localized close to the C-terminus (FIG. 5B). Overall, the presence of an intron had little influence on the expression from low-activity promoters Syn and GFAP, which indicates that mRNA splicing did not alleviate promoter repression in nonpermissive cells. The combination of the CMV enhancer with a Chicken beta-actin promoter and the hybrid intron allowed a significantly higher (>10-fold) mRNA expression compared to CMV promoter alone (FIG. 5B, C).

[0337] When comparing endpoint PCR amplification between forward and inverted intronic vectors, a discrepancy was obvious between full-length and partial capsid amplicons (FIG. 5B, right-hand lanes), which led us to question the integrity of capsid RNA. When cDNA from inverted iCAG9 genome was amplified using primers flanking the full-length capsid, multiple low-molecular weight bands were detected, whereas the forward orientation vector allowed amplification of a single product with the expected length (FIG. 5D). Sanger sequencing of low-molecular weight amplicons showed that each band corresponded to an illegitimate splicing product from the antisense capsid RNA.

[0338] In light of these results, the forward tandem promoter architecture for subsequent experiments.

[0339] Splice-specific PCR amplification was tested to avoid amplification of residual DNA present in RNA preparations. Two candidate PCR primers overlapping the CMV/Globin exon-exon junction were designed and tested them for amplification of cDNA (spliced) or plasmid DNA (still containing the intron sequence). As shown in FIG. 5E, the GloSpliceF6 primer (SEQ. ID NO: 13) allowed a fully specific amplification from cDNA without producing a detectable amplicon from the plasmid DNA sequence. This primer was used in subsequent assays to ascertain the absence of amplification from contaminating DNA.

[0340] Tandem constructs were then tested for potential interference of the P40 promoter with the cell-specific promoter placed upstream. For this, two series of AAV genomes were tested for transgene mRNA expression in HEK-293T cells. A series of transgenes where the GFP gene was placed immediately downstream of the CAG, SYNG or GFAPG promoter without P40 sequence were tested, and compared to the library constructs where AAV9 capsid was placed downstream of the P40 promoter (FIG. 6A). All genomes were packaged into the AAV9 capsid and used to infect HEK-293T at a MOI of 1e4 VG per cell. RNA was extracted 48 hours post-infection and transgene RNA was quantified by using a Taqman primer/probe mix specific for the spliced globin exon-exon junction. As shown in FIG. 6B, the expression from the CAG promoter was similar between the GFP and the P40-CAP9 constructs (2-fold lower in p40-CAP9, within the error margin of AAV titration). Expression from the synapsin promoter was drastically lower with both constructs and even lower for GFAP-driven mRNA (FIG. 6B). This was expected since HEK-293T cells are not permissive to Synapsin or GFAP promoter expression. Overall, this experiment confirmed that the presence of the P40 sequence did not alter the cell type specificity of synapsin or GFAP promoters.

[0341] This novel platform was termed TRACER (Tropism Redirection of AAV by Cell type-specific Expression of RNA). The TRACER platform solves the problems of standard methods including transduction and cell-type restrictions. (FIG. 7). Use of the TRACER system is well suited to capsid discovery where targeting peptide libraries are utilized. Screening of such a library may be conducted as outlined in FIG. 8.

[0342] While several variations of the AAV vectors which encode the capsids as payloads are taught herein, one canonical design is shown in FIG. 9B and in FIG. 12A and FIG. 12B.

[0343] Further advantages of the TRACER platform relate to the nature of the virus pool and the recovery of RNA only from fully transduced cells (FIG. 10). Consequently, capsid discovery can be accelerated in a manner that results in cell and/or tissue specific tropism (FIG. 11).

### Example 4. Generation of Peptide Display Libraries and Cloning-Free Amplification

[0344] Several peptide display capsid libraries were generated by insertion of seven contiguous randomized amino acids into the surface-exposed hypervariable loop VIII region of AAV5, AAV6, or AAV-DJ8 capsids (FIG. 13 and FIG. 39) as well as AAV9 (FIG. 14). For AAV9 libraries, two extra libraries by modifying residues at positions −2, −1 and +1 of the insertion to match the flanking sequence of the highly neurotrophic PHP.eB vector (Chan et al., 2018). In order to facilitate the insertion of various loops and to prevent contamination by wild-type capsids, defective shuttle vectors were generated in which the C-terminal region of the capsid gene comprised between the loop VIII and the stop codon was deleted and replaced by a unique BsrGI restriction site (FIG. 15A, B). Degenerate primers containing randomized NNK (K=T or G) sequences able to encode all amino acids were synthesized by IDT and used to amplify the missing capsid fragment using gBlock (IDT) double-stranded linear DNA as templates (SEQ. ID NO 14, 15, 16, 17). Linear PCR templates were preferred to plasmids in order to completely prevent the possibility of plasmid carryover in the PCR reaction. Amplicons containing the random library sequence (500 ng) were inserted in the shuttle plasmid linearized by BsrGI (2 ug) using 100 ul of NEBuilder HiFi DNA assembly master mix (NEB) during 30 minutes at 50° C. Unassembled linear templates were eliminated by addition of 5 ul of T5 exonuclease to the reaction and digestion for 30 minutes at 37° C. The entire reaction was purified with DNA Clean and Concentrator-5 and quantified with a nanodrop to estimate the efficiency of assembly. This method routinely allows the recovery of 0.5-1 ug assembled material.

[0345] gBlock templates were engineered by introducing silent mutations to remove unique restriction sites, to allow selective elimination of wild-type virus contaminants from the libraries by restriction enzyme treatment. As an example, AAV9 gBlock was engineered to remove BamHI and AfeI sites present in the parental sequence (SEQ. ID NO 17).

### Example 5. Cloning Free Amplification

[0346] Transformation of assembled library DNA into competent bacteria represents a major bottleneck in library diversity, since even highly competent strains rarely exceed 1e7-1e8 colonies per transformation. By comparison, 100 nanograms of a 6-kilobase plasmid contain 1.5e10 DNA molecules. Therefore, bacterial transformation arbitrarily eliminates more than 99% of DNA species in a given pool. A cloning-free method was therefore created that allows >100-fold amplification of Gibson-assembled DNA while bypassing the bacterial transformation bottleneck (FIG. 16). A protocol based on rolling-circle amplification was optimized, which allows unbiased exponential amplification of circular DNA templates with an extremely low error rate (Hutchinson et al., 2005). One issue with rolling circle amplification is that it produces very large (˜70 kilobases on average) heavily branched concatemers that have to be cleaved into monomers for efficient cell transfection. This process can be accomplished by several methods, for example by using restriction enzymes to generate open-ended linear templates (Hutchinson et al., 2005, Huovinen, 2012), or CRE-Lox recombination to generates self-ligated circular templates (Huovinen et al., 2011). However, open-ended DNA is sensitive to degradation by cytoplasmic exonucleases, and the CRE recombination method showed relatively low efficiency (our unpublished observations). Therefore, an alternative monomer resolution method was chosen based on the use of TelN protelomerase (Rybchin et al., 1999), an enzyme that catalyzes the formation of closed-ended linear “dogbone” DNA monomers that are highly suitable for mammalian cell transfection (Heinrich et al., 2002).

[0347] To that end, the protelomerase recognition sequence TATCAGCACACAATTGCCCATTATACGC*GCGTATAATGGACTATTGTGTGCTGATA (SEQ ID NO: 176) was introduced outside both ITRs in all the BsrGI shuttle vectors used for capsid library insertion (the asterisk depicts the position were the two complementary strands get covalently linked to each other), in order to obtain the following plasmids: TelN-Syn9-BsrGI (SEQ ID NO 18), TelN-GFAP9-BsrGI (SEQ ID NO 19), TelN-Syn5-BsrGI (SEQ ID NO 20), TelN-GFAP5-BsrGI (SEQ ID NO 21), TelN-Syn6-BsrGI (SEQ ID NO 22), TeIN-GFAP6-BsrGI (SEQ ID NO 23), TelN-SynDJ8-BsrGI (SEQ ID NO 24), TelN-GFAPDJ8-BsrGI (SEQ ID NO 25). Several methods for rolling circle amplification were tested, and the best results (high yield and low non-specific amplification) were obtained with the TruePrime technology (Expedeon), which relies on primerless amplification (Picher et al., 2016).

[0348] Briefly, the entire column-purified assembly reaction was used in a 900-ul TruePrime reaction following the manufacturer's instructions and incubated overnight at 30° C. The following day, the rolling circle reaction product was incubated 10 minutes at 65° C. to inactivate the enzymes and was diluted 5-fold in 1× thermoPol buffer with 50 ul protelomerase (NEB) in a 4.5-ml reaction. After 1 hour at 30° C., the reaction was heat-treated for 10 minutes at 70° C. to inactivate the protelomerase, and a 4.5-ul aliquot was run on an agarose gel. The entire reaction was then purified on multiple (10-12) Qiagen QiaPrep 2.0 columns following manufacturer's instructions. The typical yield obtained with this method was 160-180 ug DNA, which indicates >100-fold amplification of the starting material (typically 0.5-1 ug) and provides enough DNA for transfection of 200 cell culture dishes (FIG. 16).

[0349] The composition of all libraries was tested by next-gen sequencing with an Illumina NextSeq sequencing platform to estimate the number of variants and the eventual contamination by wild-type viruses. Amplicons were generated by PCR with Q5 polymerase (NEB) using primers containing Illumina TruSeq adapters and index barcodes. Amplicons were obtained by low-cycle PCR amplification (15 cycles), ran on 3% agarose gels and purified using Zymo gel extraction reagents. Libraries were quantified using a nanodrop, pooled into equimolar mixes and re-quantified with a KAPA library quantification kit following manufacturer's instruction. Libraries were mixed with 20-40% of PhiX control library to increase sequence diversity.

[0350] All DNA libraries generated by rolling circle showed a high sequence diversity (typically >1e8 unique variants, beyond the limits of NextSeq sequencing). By comparison, plasmid libraries generated by bacterial transformation rarely exceeded 1-2e7 variants.

### Example 6. Prevention and/or Reduction of Contamination

[0351] In another embodiment, a primer/vector system aimed at completely preventing contamination of AAV9 libraries by wild-type virus possibly recovered from environmental contamination or from naturally infected primate animal tissues was created. This was achieved by introducing a maximum number of silent mutations in the sequences surrounding the library insertion site, as well as the sequence immediately before the CAP stop codon, used for PCR amplification (FIG. 17). These libraries showed an extremely low number of wild-type AAV9 detection by NGS (<2 AAV9 reads per 5e7 total reads), suggesting that the alteration of codons surrounding the library amplification and cloning sites is a very efficient way to preserve libraries from environmental or experimental contaminations.

[0352] Libraries were produced as described previously by calcium phosphate transfection of HEK-293T cells, dual iodixanol gradient fractionation and membrane ultrafiltration using 100,000 Da MWCO Amicon-15 membranes (Millipore), quantified by real-time PCR and an aliquot was used for NGS amplicon generation and NextSeq sequencing. The diversity of viral libraries was significantly lower than that of DNA libraries (typically ˜1-2e7 unique variants) and showed a very strong counter-selection of variants containing stop codons (from 20% in DNA libraries to ˜1% in virus libraries), evincing a very high rate of cis-packaging, as observed in previous studies (Nonnenmacher et al., 2014).

### Example 7. In Vivo Selection of AAV9 Libraries for Mouse Brain Transduction

[0353] An RNA-driven library selection for increased brain transduction in a murine model was then developed. AAV9 libraries generated as described above were intravenously injected to male C57BL/6 mice at a dose 2e12 VG per mouse. Two groups of mice were injected with a single SYN-driven or GFAP-driven libraries derived from wild-type AAV9 flanking sequences, and two other groups received pooled libraries containing wild-type and PHP.eB-derived flanking sequences (FIG. 18). After one month, RNA was extracted from 200 mg of brain tissue corresponding to a whole hemisphere using RNeasy Universal Plus procedure (Qiagen). In order to minimize the possibility of RNA under sampling, the entire RNA preparation (˜200 ug) was subjected to mRNA enrichment using Oligotex beads (Qiagen) as recommended by the manufacturer. The entire preparation of enriched mRNA (˜5 ug, equivalent to 2% of total RNA) was then reverse transcribed in a 40-ul Superscript IV reaction (Life Technologies) using a library-specific primer with the following sequence: 5′-GAAACGAATTAAACGGTTTATTGATTAACAATCGATTA-3′ (SEQ ID NO: 415) (CAP stop codon is underlined) (FIG. 19). The entire pool of cDNA was then amplified 30 cycles with 55° C. annealing temperature and 2 minutes elongation in a 500-ul PCR reaction assembled with Q5 master mix, GloSpliceF6 forward primer and a CAP9-specific reverse primer: 5′-CGGTTTATTGATTAACAATCGATTACAGATTACGAGTCAGGTATC-3′ (SEQ ID NO: 416) (CAP stop codon is underlined). This method allowed recovery of abundant amplicons from all brain samples (FIG. 20).

[0354] Full-length capsid amplicons were then used as templates for NGS library generation, as well as cloning into a P1 DNA library for the next round of biopanning, using the exact same assembly and cloning-free procedure. NGS analysis performed on PCR amplicons indicated that the library diversity dropped ˜25-fold (from 1e7 to 4e5) after the first round of biopanning for both Syn-driven and GFAP-driven libraries (FIG. 21). The number of 1^{st} pass variants (P1) recovered was too high to show any significant sequence convergence at this point, and there was very little overlap between the composition of pools recovered from individual animals. Therefore, a second round of selection was performed. After the second biopanning (P2), the total number of unique variants further dropped by 4-5-fold, down to <1e5 peptides. Importantly, some libraries recovered after the first round of biopanning showed significant counts of wild-type AAV9 and AAV-PHP.eB sequences, presumably from environmental contamination. These later became useful benchmarks in the second round of enrichment.

[0355] Following RNA recovery and PCR amplification, a systematic enrichment analysis by NGS was performed by calculating the ratio of P2/P1 reads and comparing it to AAV9 or PHP.eB P2/P1 ratio. As shown in FIG. 22, Table 4, FIG. 23 and Table 5, several capsids showed a higher enrichment ratio than the benchmark PHP.eB in both Syn-driven and GFAP-driven libraries, and sequence convergence was obvious, as represented by consensus sequence generation.

TABLE 4
Capsid analysis results

| Rank | | | SEQ | | | Brain/ |
|---|---|---|---|---|---|---|
| (enrichment | Ranking | | ID | Average | p1 | virus |
| factor) | (count) | Peptide | NO | of brain | AEvirus_S11 | stock |
| 1 | 136 | DGTLAVHFK | 417 | 2546.3 | 6 | 254.6 |
| 2 | 153 | DGTFAVPFK | 418 | 2321.7 | 6 | 232.2 |
| 3 | 155 | EGTLAVPFK | 419 | 2351.0 | 7 | 201.5 |
| 4 | 147 | DGTMAVPFK | 420 | 2547.0 | 8 | 191.0 |
| 5 | 32 | DGTGGTKGW | 107 | 11116.0 | 35 | 190.6 |
| 6 | 3 | AQWPTSYDA | 62 | 119359.7 | 512 | 139.9 |
| 7 | 99 | DGTLAVTFK | 421 | 3779.7 | 19 | 119.4 |
| 8 | 176 | DGTLAVPIK | 422 | 1882.0 | 13 | 86.9 |
| 9 | 36 | AQTTEKPWL | 83 | 10192.0 | 76 | 80.5 |
| 10 | 165 | DGTAIHLSS | 67 | 2885.0 | 23 | 75.3 |
| 11 | 13 | DGTLSQPFR | 65 | 42145.7 | 344 | 73.5 |
| 12 | 2 | DGTLAAPFK | 120 | 157129.3 | 1,300 | 72.5 |
| 13 | 8 | AQPEGSARW | 60 | 70884.0 | 594 | 71.6 |
| 14 | 48 | AQWPTAYDA | 256 | 5934.0 | 53 | 67.2 |
| 15 | 198 | DGTLQQPFR | 89 | 2793.3 | 25 | 67.0 |
| 16 | 104 | DGTLAVNFK | 346 | 3511.0 | 32 | 65.8 |
| 17 | 31 | DGTGNLSGW | 302 | 14521.3 | 133 | 65.5 |
| 18 | 158 | DGTLEVTFK | 423 | 2337.7 | 22 | 63.8 |
| 19 | 51 | DGTMDKPFR | 70 | 23962.3 | 234 | 61.4 |
| 20 | 80 | DGTGQVTGW | 68 | 6242.7 | 62 | 60.4 |
| 21 | 42 | AQFPTNYDS | 66 | 8640.0 | 86 | 60.3 |
| 22 | 127 | ERTLAVPFK | 424 | 2873.3 | 31 | 55.6 |
| 23 | 1 | DGTLAVPFK | 71 | 9885065.7 | 110,785 | 53.5 |
| 24 | 61 | DGTGTTMGW | 324 | 6753.0 | 76 | 53.3 |
| 25 | 69 | DGSQSTTGW | 136 | 7227.7 | 82 | 52.9 |
| 26 | 186 | DGTVSNPFR | 403 | 2074.3 | 24 | 51.9 |
| 27 | 160 | DGTLEVHFK | 348 | 2245.0 | 26 | 51.8 |
| 28 | 29 | DGTISQPFK | 105 | 20505.7 | 243 | 50.6 |
| 29 | 102 | AQGSWNPPA | 80 | 3746.0 | 45 | 49.9 |
| 30 | 59 | DGTHSTTGW | 145 | 7499.0 | 91 | 49.4 |
| 31 | 23 | DGTGSTTGW | 134 | 21582.0 | 272 | 47.6 |
| 32 | 142 | DGTGTTTGW | 130 | 3077.3 | 39 | 47.3 |
| 33 | 74 | DGTVTTTGW | 405 | 5088.7 | 66 | 46.3 |
| 34 | 35 | DGTTYVPPR | 75 | 9614.7 | 126 | 45.8 |
| 35 | 40 | DGTMDRPFK | 102 | 7868.3 | 104 | 45.4 |
| 36 | 4 | DGTGTTLGW | 323 | 88397.3 | 1,169 | 45.4 |
| 37 | 156 | DGTALMLSS | 280 | 2444.0 | 34 | 43.1 |
| 38 | 116 | DGTNTTHGW | 113 | 3065.0 | 43 | 42.8 |
| 39 | 98 | SGSLAVPFK | 425 | 4107.3 | 58 | 42.5 |
| 40 | 38 | DGTATTTGW | 285 | 10529.7 | 150 | 42.1 |
| 41 | 11 | DGTSYVPPR | 78 | 36293.3 | 526 | 41.4 |
| 42 | 89 | DGTGNTHGW | 72 | 3399.3 | 50 | 40.8 |
| 43 | 129 | DGTASVTGW | 283 | 4824.3 | 71 | 40.8 |
| 44 | 12 | AQWELSNGY | 246 | 40837.0 | 611 | 40.1 |
| 45 | 115 | DGTGNTSGW | 137 | 3405.0 | 51 | 40.1 |
| 46 | 67 | DGKGSTQGW | 272 | 5818.0 | 88 | 39.7 |
| 47 | 137 | DGTVIMLSS | 397 | 3781.0 | 58 | 39.1 |
| 48 | 119 | DGTGGVMGW | 297 | 2302.3 | 36 | 38.4 |
| 49 | 58 | DGGGTTTGW | 270 | 11174.3 | 175 | 38.3 |
| 50 | 71 | DGTSIHLSS | 378 | 5703.7 | 90 | 38.0 |

TABLE 5
Capsid analysis results

| Rank | | | SEQ | | | Brain/ |
|---|---|---|---|---|---|---|
| (enrichment | Ranking | | ID | Average | p1 | virus |
| factor) | (count) | Peptide | NO | of brain | AEvirus_S11 | stock |
| 1 | 106 | DGTGGTKGW | 107 | 3620.7 | 0 | NA |
| 2 | 264 | GGTRNTAPM | 426 | 831.0 | 0 | NA |
| 3 | 295 | AQGRMTDSQ | 199 | 716.0 | 0 | NA |
| 4 | 677 | DGNSYVPPR | 427 | 474.3 | 0 | NA |
| 5 | 700 | AQAGVSGQR | 428 | 456.0 | 0 | NA |
| 6 | 731 | AQAGNSNAV | 429 | 844.0 | 0 | NA |
| 7 | 181 | DGTGGLTGW | 294 | 4044.3 | 4 | 606.7 |
| 8 | 558 | AQWVYGQTV | 430 | 977.7 | 1 | 586.6 |
| 9 | 123 | DGTSFSPPK | 431 | 4227.3 | 10 | 253.6 |
| 10 | 35 | DGTIERPFR | 87 | 29872.0 | 92 | 194.8 |
| 11 | 105 | DGTTLVPPR | 116 | 5597.3 | 19 | 176.8 |
| 12 | 18 | DGTADKPFR | 63 | 103305.3 | 363 | 170.8 |
| 13 | 22 | DGTASYYDS | 61 | 61841.3 | 233 | 159.2 |
| 14 | 26 | AQTTDRPFL | 85 | 38893.7 | 147 | 158.7 |
| 15 | 8 | DGTQFSPPR | 108 | 206660.7 | 801 | 154.8 |
| 16 | 169 | DGTTTYGAR | 77 | 4237.3 | 17 | 149.6 |
| 17 | 11 | AQFVVGQQY | 95 | 152965.0 | 625 | 146.8 |
| 18 | 61 | DGTSYVPPR | 78 | 13968.0 | 58 | 144.5 |
| 19 | 16 | DGTAERPFR | 140 | 134132.7 | 565 | 142.4 |
| 20 | 21 | AQGENPGRW | 96 | 68919.7 | 292 | 141.6 |
| 21 | 157 | DGTSFTPPR | 88 | 3210.0 | 14 | 137.6 |
| 22 | 73 | AQTLARPFV | 98 | 5947.7 | 26 | 137.3 |
| 23 | 9 | DGTTWTPPR | 139 | 184936.7 | 825 | 134.5 |
| 24 | 721 | DGTATTMGW | 284 | 5562.3 | 25 | 133.5 |
| 25 | 129 | AQGTWNPPA | 82 | 12379.3 | 57 | 130.3 |
| 26 | 215 | DGTRLMLSS | 368 | 2505.0 | 12 | 125.3 |
| 27 | 60 | AQPLAVYGA | 217 | 13419.3 | 66 | 122.0 |
| 28 | 909 | AQGLDLGRW | 432 | 405.0 | 2 | 121.5 |
| 29 | 53 | DGTSFTPPK | 81 | 13673.3 | 68 | 120.6 |
| 30 | 412 | AQVMSGVGQ | 433 | 583.0 | 3 | 116.6 |
| 31 | 390 | AQKSVGSVY | 205 | 4415.7 | 23 | 115.2 |
| 32 | 70 | AQTREYLLG | 93 | 5752.7 | 30 | 115.1 |
| 33 | 43 | DGTNGLKGW | 76 | 15068.7 | 79 | 114.4 |
| 34 | 93 | AQYLAGYTV | 262 | 6223.3 | 33 | 113.2 |
| 35 | 54 | AQTGFAPPR | 161 | 14611.3 | 78 | 112.4 |
| 36 | 115 | DGTLNNPFR | 109 | 4719.7 | 26 | 108.9 |
| 37 | 968 | DGNGGLKGW | 167 | 3199.0 | 18 | 106.6 |
| 38 | 120 | AQSVAKPFL | 231 | 6929.7 | 39 | 106.6 |
| 39 | 544 | DGTHGLRGW | 434 | 528.0 | 3 | 105.6 |
| 40 | 159 | AQSVVRPFL | 233 | 2457.3 | 14 | 105.3 |
| 41 | 65 | DGTRNMYEG | 135 | 21086.3 | 124 | 102.0 |
| 42 | 556 | AQRWAADSS | 435 | 500.7 | 3 | 100.1 |
| 43 | 30 | AQGPTRPFL | 125 | 46225.3 | 279 | 99.4 |
| 44 | 64 | DGTVPYLSS | 401 | 22384.3 | 137 | 98.0 |
| 45 | 870 | AQTGASGAT | 436 | 473.7 | 3 | 94.7 |
| 46 | 341 | AQLVAGYSQ | 437 | 1240.0 | 8 | 93.0 |
| 47 | 375 | AQSGGVGQV | 228 | 768.3 | 5 | 92.2 |
| 48 | 145 | AQSLARLFP | 438 | 4435.3 | 29 | 91.8 |
| 49 | 1 | DGTLAVPFK | 71 | 1445517.0 | 9453 | 91.7 |
| 50 | 124 | DGTGNVTGW | 69 | 5424.3 | 36 | 90.4 |

[0356] Importantly, there was also a strong sequence convergence between different animals, suggesting an efficient selection after only two passages. FIG. 24 and FIG. 25 provide an estimation of brain/liver specificity in GFAP-AAV9 peptide library candidates.

### Example 8. Multiplexing Selections

[0357] For the final multiplex in vivo screen by individual variant pooling in equimolar library, a subpopulation of variants with promising properties (such as, but not limited to, enrichment factor, liver detargeting, high counts in more than one mouse, etc.) may be selected as shown in FIG. 26 and then an equimolar pool of primers encoding all the 7-mers (microchip solid-phase synthesis, up to 3,800 primers per chip) can be synthesized. The limited diversity library may be produced including internal controls such as, but not limited to, PHP.N, PHP.B, wild-type AAV9 (wtAAV9) and/or any other serotype including those taught herein. The mice are injected and then the RNA enrichment is compared to internal controls in a similar manner to a barcoding study, which is known in the art and described herein.

### Example 9. Codon Optimization

[0358] Codon variants may be used to improve data strength when using synthesized libraries. A listing of NNK codons, NNM codons and the most favorable NNM codons in mammals for various amino acids is provided in Table 6. In Table 6, * means that no NNM codon was available and ** means “avoid homopolymeric stretches if possible.”

TABLE 6
Codon Variants

| | | | Most favorable |
|---|---|---|---|
| Amino | | | NNM codon |
| acid | NNK codon | NNM codons | in mammals |
| F | TTT | TTC | TTC |
| L | TTG, CTT, CTG | TTA, CTC, CTA | CTC |
| S | TCT, TCG, AGT | TCC, TCA, AGC | AGC |
| Y | TAT | TAC | TAC |
| C | TGT | TGC | TGC |
| W | TGG | | TGG* |
| P | CCT, CCG | CCC, CCA | CCA** |
| H | CAT | CAC | CAC |
| Q | CAG | CAA | CAA |
| R | CGT, CGG, AGG | CGC, CGA, AGA | AGA |
| I | ATT | ATC, ATA | ATC |
| M | ATG | | ATT* |
| T | ACT, ACG | ACC, ACA | ACC |
| N | AAT | AAC | AAC |
| K | AAG | AAA | AAA |
| V | GTT, GTG | GTC, GTA | GTC |
| A | GCT, GCG | GCC, GCA | GCC |
| D | GAT | GAC | GAC |
| E | GAG | GAA | GAA |
| G | GGT, GGG | GGC, GGA | GGC |
| stop | TAG | TAC, TAA | n/a |

*no NNM codon available
**avoid homopolymeric stretches if possible

[0359] In order to have a balanced library it is recommended to establish a list of potential candidates. Then, using Table 6, a pooled primer library containing every peptide variant with encoded by NNK codons (original from library) and non-NNK codons (maximum variation). If similar behavior is seen between the two variants of the same peptide, this would strengthen the analysis of that peptide. Additionally, it is recommended to choose the most favorable NNM codons (M-A or C).

### Example 10. Library Generation

[0360] The top-ranking 330 peptide variants from SYN-driven and GFAP-driven libraries that showed enhanced performance relative to the parental AAV9 were selected. A de novo library by pooled primer synthesis of all 330 peptide sequences plus AAV9, AAV-PHP.B and AAV-PHP.eB controls was generated (Table 7). In order to exclude potential artifacts due to the DNA sequence and to increase the robustness of the assay, each peptide variant was encoded by two different DNA sequences, one where all amino acids were encoded by NNK codons (identical to the original library) and another one where NNM codons were used whenever possible (M=C or A, Table 6).

TABLE 7
Peptide variants selected after 2 rounds
of RNA-driven mouse brain biopanning

| | SEQ | Nucleotide | SEQ | Nucleotide | SEQ |
|---|---|---|---|---|---|
| Peptide | ID | sequence | ID | sequence | ID |
| Sequence | NO: | (NNK codons) | NO: | (NNM codons) | NO: |
| AQ (AAV9) | | CAGAGTGCTCAG | 439 | CAGAGTGCCCAA | 772 |
| | | GCACAG | | GCACAG | |
| AQAGAGSER | 194 | CAGAGTGCCCAA | 440 | CAGAGTGCACAA | 773 |
| | | GCGGGTGCGGGG | | GCAGGAGCAGGA | |
| | | TCGGAGCGGGCA | | AGCGAAAGAGCA | |
| | | CAG | | CAG | |
| AQDQNPGRW | 195 | CAGAGTGCCCAA | 441 | CAGAGTGCACAA | 774 |
| | | GATCAGAATCCG | | GACCAAAACCCA | |
| | | GGGCGTTGGGCA | | GGAAGATGGGCA | |
| | | CAG | | CAG | |
| AQELTRPFL | 144 | CAGAGTGCCCAA | 442 | CAGAGTGCACAA | 775 |
| | | GAGTTGACGCGT | | GAACTCACAAGA | |
| | | CCGTTTTTGGCAC | | CCATTCCTCGCAC | |
| | | AG | | AG | |
| AQEVPGYRW | 196 | CAGAGTGCCCAA | 443 | CAGAGTGCACAA | 776 |
| | | GAGGTGCCTGGG | | GAAGTCCCAGGA | |
| | | TATAGGTGGGCA | | TACAGATGGGCA | |
| | | CAG | | CAG | |
| AQFPTNYDS | 66 | CAGAGTGCCCAA | 444 | CAGAGTGCACAA | 777 |
| | | TTTCCTACGAATT | | TTCCCAACAAACT | |
| | | ATGATTCTGCACA | | ACGACAGCGCAC | |
| | | G | | AG | |
| AQFVVGQQY | 95 | CAGAGTGCCCAA | 445 | CAGAGTGCACAA | 778 |
| | | TTTGTGGTTGGTC | | TTCGTCGTCGGAC | |
| | | AGCAGTATGCAC | | AACAATACGCAC | |
| | | AG | | AG | |
| AQGASPGRW | 149 | CAGAGTGCCCAA | 446 | CAGAGTGCACAA | 779 |
| | | GGGGCTAGTCCG | | GGAGCAAGCCCA | |
| | | GGGCGGTGGGCA | | GGAAGATGGGCA | |
| | | CAG | | CAG | |
| AQGENPGRW | 96 | CAGAGTGCCCAA | 447 | CAGAGTGCACAA | 780 |
| | | GGGGAGAATCCG | | GGAGAAAACCCA | |
| | | GGTAGGTGGGCA | | GGAAGATGGGCA | |
| | | CAG | | CAG | |
| AQGGNPGRW | 91 | CAGAGTGCCCAA | 448 | CAGAGTGCACAA | 781 |
| | | GGGGGGAATCCG | | GGAGGAAACCCA | |
| | | GGTCGGTGGGCA | | GGAAGATGGGCA | |
| | | CAG | | CAG | |
| AQGGSTGSN | 197 | CAGAGTGCCCAA | 449 | CAGAGTGCACAA | 782 |
| | | GGTGGTTCTACG | | GGAGGAAGCACA | |
| | | GGGTCGAATGCA | | GGAAGCAACGCA | |
| | | CAG | | CAG | |
| AQGPTRPFL | 125 | CAGAGTGCCCAA | 450 | CAGAGTGCACAA | 783 |
| | | GGGCCGACTAGG | | GGACCAACAAGA | |
| | | CCGTTTTTGGCAC | | CCATTCCTCGCAC | |
| | | AG | | AG | |
| AQGRDGWAA | 198 | CAGAGTGCCCAA | 451 | CAGAGTGCACAA | 784 |
| | | GGTCGGGATGGT | | GGAAGAGACGGA | |
| | | TGGGCGGCGGCA | | TGGGCAGCAGCA | |
| | | CAG | | CAG | |
| AQGRMTDSQ | 199 | CAGAGTGCCCAA | 452 | CAGAGTGCACAA | 785 |
| | | GGTCGTATGACT | | GGAAGAATGACA | |
| | | GATTCGCAGGCA | | GACAGCCAAGCA | |
| | | CAG | | CAG | |
| AQGSDVGRW | 128 | CAGAGTGCCCAA | 453 | CAGAGTGCACAA | 786 |
| | | GGTAGTGATGTG | | GGAAGCGACGTC | |
| | | GGGCGGTGGGCA | | GGAAGATGGGCA | |
| | | CAG | | CAG | |
| AQGSNPGRW | 103 | CAGAGTGCCCAA | 454 | CAGAGTGCACAA | 787 |
| | | GGTAGTAATCCG | | GGAAGCAACCCA | |
| | | GGGAGGTGGGCA | | GGAAGATGGGCA | |
| | | CAG | | CAG | |
| AQGSNSPQV | 200 | CAGAGTGCCCAA | 455 | CAGAGTGCACAA | 788 |
| | | GGGTCTAATTCGC | | GGAAGCAACAGC | |
| | | CTCAGGTGGCAC | | CCACAAGTCGCA | |
| | | AG | | CAG | |
| AQGSWNPPA | 80 | CAGAGTGCCCAA | 456 | CAGAGTGCACAA | 789 |
| | | GGTTCGTGGAAT | | GGAAGCTGGAAC | |
| | | CCGCCGGCGGCA | | CCACCAGCAGCA | |
| | | CAG | | CAG | |
| AQGTWNPPA | 82 | CAGAGTGCCCAA | 457 | CAGAGTGCACAA | 790 |
| | | GGTACTTGGAAT | | GGAACATGGAAC | |
| | | CCGCCGGCTGCA | | CCACCAGCAGCA | |
| | | CAG | | CAG | |
| AQGVFIPPK | 201 | CAGAGTGCCCAA | 458 | CAGAGTGCACAA | 791 |
| | | GGTGTTTTTATTC | | GGAGTCTTCATCC | |
| | | CGCCGAAGGCAC | | CACCAAAAGCAC | |
| | | AG | | AG | |
| AQHVNASQS | 202 | CAGAGTGCCCAA | 459 | CAGAGTGCACAA | 792 |
| | | CATGTGAATGCTT | | CACGTCAACGCA | |
| | | CTCAGTCTGCACA | | AGCCAAAGCGCA | |
| | | G | | CAG | |
| AQIKAGWAQ | 203 | CAGAGTGCCCAA | 460 | CAGAGTGCACAA | 793 |
| | | ATTAAGGCGGGG | | ATCAAAGCAGGA | |
| | | TGGGCGCAGGCA | | TGGGCACAAGCA | |
| | | CAG | | CAG | |
| AQIMSGYAQ | 204 | CAGAGTGCCCAA | 461 | CAGAGTGCACAA | 794 |
| | | ATTATGAGTGGG | | ATCATGAGCGGA | |
| | | TATGCTCAGGCA | | TACGCACAAGCA | |
| | | CAG | | CAG | |
| AQKSVGSVY | 205 | CAGAGTGCCCAA | 462 | CAGAGTGCACAA | 795 |
| | | AAGAGTGTGGGT | | AAAAGCGTCGGA | |
| | | AGTGTTTATGCAC | | AGCGTCTACGCA | |
| | | AG | | CAG | |
| AQLEHGFAQ | 206 | CAGAGTGCCCAA | 463 | CAGAGTGCACAA | 796 |
| | | CTTGAGCATGGG | | CTCGAACACGGA | |
| | | TTTGCTCAGGCAC | | TTCGCACAAGCA | |
| | | AG | | CAG | |
| AQLGGVLSA | 207 | CAGAGTGCCCAA | 464 | CAGAGTGCACAA | 797 |
| | | CTGGGTGGGGTG | | CTCGGAGGAGTC | |
| | | TTGAGTGCTGCAC | | CTCAGCGCAGCA | |
| | | AG | | CAG | |
| AQLGLSQGR | 208 | CAGAGTGCCCAA | 465 | CAGAGTGCACAA | 798 |
| | | CTGGGGCTTTCGC | | CTCGGACTCAGC | |
| | | AGGGGCGGGCAC | | CAAGGAAGAGCA | |
| | | AG | | CAG | |
| AQLGYGFAQ | 209 | CAGAGTGCCCAA | 466 | CAGAGTGCACAA | 799 |
| | | TTGGGGTATGGG | | CTCGGATACGGA | |
| | | TTTGCTCAGGCAC | | TTCGCACAAGCA | |
| | | AG | | CAG | |
| AQLKYGLAQ | 115 | CAGAGTGCCCAA | 467 | CAGAGTGCACAA | 800 |
| | | TTGAAGTATGGTC | | CTCAAATACGGA | |
| | | TTGCGCAGGCAC | | CTCGCACAAGCA | |
| | | AG | | CAG | |
| AQLRIGFAQ | 210 | CAGAGTGCCCAA | 468 | CAGAGTGCACAA | 801 |
| | | CTTCGGATTGGTT | | CTCAGAATCGGA | |
| | | TTGCTCAGGCAC | | TTCGCACAAGCA | |
| | | AG | | CAG | |
| AQLRMGYSQ | 211 | CAGAGTGCCCAA | 469 | CAGAGTGCACAA | 802 |
| | | TTGCGTATGGGTT | | CTCAGAATGGGA | |
| | | ATAGTCAGGCAC | | TACAGCCAAGCA | |
| | | AG | | CAG | |
| AQLRQGYAQ | 212 | CAGAGTGCCCAA | 470 | CAGAGTGCACAA | 803 |
| | | CTGAGGCAGGGG | | CTCAGACAAGGA | |
| | | TATGCTCAGGCA | | TACGCACAAGCA | |
| | | CAG | | CAG | |
| AQLRVGFAQ | 123 | CAGAGTGCCCAA | 471 | CAGAGTGCACAA | 804 |
| | | TTGCGTGTTGGTT | | CTCAGAGTCGGA | |
| | | TTGCGCAGGCAC | | TTCGCACAAGCA | |
| | | AG | | CAG | |
| AQLSCRSQM | 213 | CAGAGTGCCCAA | 472 | CAGAGTGCACAA | 805 |
| | | CTGTCGTGTCGGA | | CTCAGCTGCAGA | |
| | | GTCAGATGGCAC | | AGCCAAATGGCA | |
| | | AG | | CAG | |
| AQLTYSQSL | 214 | CAGAGTGCCCAA | 473 | CAGAGTGCACAA | 806 |
| | | TTGACGTATAGTC | | CTCACATACAGC | |
| | | AGTCGCTGGCAC | | CAAAGCCTCGCA | |
| | | AG | | CAG | |
| AQLYKGYSQ | 215 | CAGAGTGCCCAA | 474 | CAGAGTGCACAA | 807 |
| | | CTGTATAAGGGTT | | CTCTACAAAGGA | |
| | | ATAGTCAGGCAC | | TACAGCCAAGCA | |
| | | AG | | CAG | |
| AQMPQRPFL | 216 | CAGAGTGCCCAA | 475 | CAGAGTGCACAA | 808 |
| | | ATGCCTCAGCGG | | ATGCCACAAAGA | |
| | | CCGTTTTTGGCAC | | CCATTCCTCGCAC | |
| | | AG | | AG | |
| AQNGNPGRW | 84 | CAGAGTGCCCAA | 476 | CAGAGTGCACAA | 809 |
| | | AATGGTAATCCG | | AACGGAAACCCA | |
| | | GGGCGGTGGGCA | | GGAAGATGGGCA | |
| | | CAG | | CAG | |
| AQPEGSARW | 60 | CAGAGTGCCCAA | 477 | CAGAGTGCACAA | 810 |
| | | CCTGAGGGTAGT | | CCAGAAGGAAGC | |
| | | GCGAGGTGGGCA | | GCAAGATGGGCA | |
| | | CAG | | CAG | |
| AQPLAVYGA | 217 | CAGAGTGCCCAA | 478 | CAGAGTGCACAA | 811 |
| | | CCGTTGGCTGTTT | | CCACTCGCAGTCT | |
| | | ATGGGGCGGCAC | | ACGGAGCAGCAC | |
| | | AG | | AG | |
| AQPQSSSMS | 218 | CAGAGTGCCCAA | 479 | CAGAGTGCACAA | 812 |
| | | CCGCAGTCGTCGT | | CCACAAAGCAGC | |
| | | CGATGAGTGCAC | | AGCATGAGCGCA | |
| | | AG | | CAG | |
| AQPSVGGYW | 219 | CAGAGTGCCCAA | 480 | CAGAGTGCACAA | 813 |
| | | CCGAGTGTGGGT | | CCAAGCGTCGGA | |
| | | GGGTATTGGGCA | | GGATACTGGGCA | |
| | | CAG | | CAG | |
| AQQAVGQSW | 220 | CAGAGTGCCCAA | 481 | CAGAGTGCACAA | 814 |
| | | CAGGCTGTGGGT | | CAAGCAGTCGGA | |
| | | CAGTCTTGGGCA | | CAAAGCTGGGCA | |
| | | CAG | | CAG | |
| AQQRSLASG | 221 | CAGAGTGCCCAA | 482 | CAGAGTGCACAA | 815 |
| | | CAGCGTTCGCTG | | CAAAGAAGCCTC | |
| | | GCTTCGGGTGCA | | GCAAGCGGAGCA | |
| | | CAG | | CAG | |
| AQQVMNSQG | 222 | CAGAGTGCCCAA | 483 | CAGAGTGCACAA | 816 |
| | | CAGGTGATGAAT | | CAAGTCATGAAC | |
| | | AGTCAGGGGGCA | | AGCCAAGGAGCA | |
| | | CAG | | CAG | |
| AQRGVGLSQ | 223 | CAGAGTGCCCAA | 484 | CAGAGTGCACAA | 817 |
| | | CGTGGGGTTGGG | | AGAGGAGTCGGA | |
| | | TTGAGTCAGGCA | | CTCAGCCAAGCA | |
| | | CAG | | CAG | |
| AQRHDAEGS | 224 | CAGAGTGCCCAA | 485 | CAGAGTGCACAA | 818 |
| | | AGGCATGATGCG | | AGACACGACGCA | |
| | | GAGGGTAGTGCA | | GAAGGAAGCGCA | |
| | | CAG | | CAG | |
| AQRKGEPHY | 225 | CAGAGTGCCCAA | 486 | CAGAGTGCACAA | 819 |
| | | CGTAAGGGGGAG | | AGAAAAGGAGAA | |
| | | CCTCATTATGCAC | | CCACACTACGCA | |
| | | AG | | CAG | |
| AQRYTGDSS | 138 | CAGAGTGCCCAA | 487 | CAGAGTGCACAA | 820 |
| | | AGGTATACGGGG | | AGATACACAGGA | |
| | | GATTCTAGTGCAC | | GACAGCAGCGCA | |
| | | AG | | CAG | |
| AQSAMAAKG | 226 | CAGAGTGCCCAA | 488 | CAGAGTGCACAA | 821 |
| | | TCGGCGATGGCT | | AGCGCAATGGCA | |
| | | GCGAAGGGTGCA | | GCAAAAGGAGCA | |
| | | CAG | | CAG | |
| AQSGGLTGS | 227 | CAGAGTGCCCAA | 489 | CAGAGTGCACAA | 822 |
| | | TCTGGGGGTCTTA | | AGCGGAGGACTC | |
| | | CGGGGAGTGCAC | | ACAGGAAGCGCA | |
| | | AG | | CAG | |
| AQSGGVGQV | 228 | CAGAGTGCCCAA | 490 | CAGAGTGCACAA | 823 |
| | | TCGGGTGGGGTG | | AGCGGAGGAGTC | |
| | | GGGCAGGTGGCA | | GGACAAGTCGCA | |
| | | CAG | | CAG | |
| AQSLATPFR | 169 | CAGAGTGCCCAA | 491 | CAGAGTGCACAA | 824 |
| | | TCTCTGGCGACGC | | AGCCTCGCAACA | |
| | | CTTTTCGTGCACA | | CCATTCAGAGCA | |
| | | G | | CAG | |
| AQSMSRPFL | 229 | CAGAGTGCCCAA | 492 | CAGAGTGCACAA | 825 |
| | | AGTATGTCGCGTC | | AGCATGAGCAGA | |
| | | CGTTTCTGGCACA | | CCATTCCTCGCAC | |
| | | G | | AG | |
| AQSQLRPFL | 230 | CAGAGTGCCCAA | 493 | CAGAGTGCACAA | 826 |
| | | AGTCAGCTTAGG | | AGCCAACTCAGA | |
| | | CCGTTTCTTGCAC | | CCATTCCTCGCAC | |
| | | AG | | AG | |
| AQSVAKPFL | 231 | CAGAGTGCCCAA | 494 | CAGAGTGCACAA | 827 |
| | | TCTGTGGCTAAGC | | AGCGTCGCAAAA | |
| | | CTTTTTTGGCACA | | CCATTCCTCGCAC | |
| | | G | | AG | |
| AQSVSQPFR | 232 | CAGAGTGCCCAA | 495 | CAGAGTGCACAA | 828 |
| | | TCGGTTTCGCAGC | | AGCGTCAGCCAA | |
| | | CGTTTAGGGCAC | | CCATTCAGAGCA | |
| | | AG | | CAG | |
| AQSVVRPFL | 233 | CAGAGTGCCCAA | 496 | CAGAGTGCACAA | 829 |
| | | TCTGTGGTGCGTC | | AGCGTCGTCAGA | |
| | | CTTTTCTGGCACA | | CCATTCCTCGCAC | |
| | | G | | AG | |
| AQTALSSST | 234 | CAGAGTGCCCAA | 497 | CAGAGTGCACAA | 830 |
| | | ACTGCGCTTTCGT | | ACAGCACTCAGC | |
| | | CGTCGACGGCAC | | AGCAGCACAGCA | |
| | | AG | | CAG | |
| AQTEMGGRC | 235 | CAGAGTGCCCAA | 498 | CAGAGTGCACAA | 831 |
| | | ACGGAGATGGGT | | ACAGAAATGGGA | |
| | | GGGAGGTGTGCA | | GGAAGATGCGCA | |
| | | CAG | | CAG | |
| AQTGFAPPR | 161 | CAGAGTGCCCAA | 499 | CAGAGTGCACAA | 832 |
| | | ACGGGGTTTGCTC | | ACAGGATTCGCA | |
| | | CGCCGCGTGCAC | | CCACCAAGAGCA | |
| | | AG | | CAG | |
| AQTIRGYSS | 236 | CAGAGTGCCCAA | 500 | CAGAGTGCACAA | 833 |
| | | ACGATTCGGGGG | | ACAATCAGAGGA | |
| | | TATTCGTCTGCAC | | TACAGCAGCGCA | |
| | | AG | | CAG | |
| AQTISNYHT | 237 | CAGAGTGCCCAA | 501 | CAGAGTGCACAA | 834 |
| | | ACTATTTCTAATT | | ACAATCAGCAAC | |
| | | ATCATACGGCAC | | TACCACACAGCA | |
| | | AG | | CAG | |
| AQTLARPFV | 98 | CAGAGTGCCCAA | 502 | CAGAGTGCACAA | 835 |
| | | ACTTTGGCGCGTC | | ACACTCGCAAGA | |
| | | CGTTTGTGGCACA | | CCATTCGTCGCAC | |
| | | G | | AG | |
| AQTLAVPFK | 168 | CAGAGTGCCCAA | 503 | CAGAGTGCACAA | 836 |
| (PHP.B) | | ACTTTGGCGGTGC | | ACACTCGCAGTC | |
| | | CTTTTAAGGCACA | | CCATTCAAAGCA | |
| | | G | | CAG | |
| AQTPDRPWL | 238 | CAGAGTGCCCAA | 504 | CAGAGTGCACAA | 837 |
| | | ACTCCTGATCGTC | | ACACCAGACAGA | |
| | | CTTGGTTGGCACA | | CCATGGCTCGCA | |
| | | G | | CAG | |
| AQTRAGYAQ | 126 | CAGAGTGCCCAA | 505 | CAGAGTGCACAA | 838 |
| | | ACTCGGGCTGGG | | ACAAGAGCAGGA | |
| | | TATGCTCAGGCA | | TACGCACAAGCA | |
| | | CAG | | CAG | |
| AQTRAGYSQ | 141 | CAGAGTGCCCAA | 506 | CAGAGTGCACAA | 839 |
| | | ACTAGGGCGGGG | | ACAAGAGCAGGA | |
| | | TATTCTCAGGCAC | | TACAGCCAAGCA | |
| | | AG | | CAG | |
| AQTREYLLG | 93 | CAGAGTGCCCAA | 507 | CAGAGTGCACAA | 840 |
| | | ACGCGTGAGTAT | | ACAAGAGAATAC | |
| | | CTGCTGGGGGCA | | CTCCTCGGAGCA | |
| | | CAG | | CAG | |
| AQTSAKPFL | 163 | CAGAGTGCCCAA | 508 | CAGAGTGCACAA | 841 |
| | | ACTTCTGCGAAG | | ACAAGCGCAAAA | |
| | | CCGTTTCTTGCAC | | CCATTCCTCGCAC | |
| | | AG | | AG | |
| AQTSARPFL | 100 | CAGAGTGCCCAA | 509 | CAGAGTGCACAA | 842 |
| | | ACTTCTGCTAGGC | | ACAAGCGCAAGA | |
| | | CTTTTCTGGCACA | | CCATTCCTCGCAC | |
| | | G | | AG | |
| AQTTDRPFL | 85 | CAGAGTGCCCAA | 510 | CAGAGTGCACAA | 843 |
| | | ACTACTGATAGG | | ACAACAGACAGA | |
| | | CCTTTTTTGGCAC | | CCATTCCTCGCAC | |
| | | AG | | AG | |
| AQTTEKPWL | 83 | CAGAGTGCCCAA | 511 | CAGAGTGCACAA | 844 |
| | | ACGACTGAGAAG | | ACAACAGAAAAA | |
| | | CCGTGGCTGGCA | | CCATGGCTCGCA | |
| | | CAG | | CAG | |
| AQTVARPFY | 239 | CAGAGTGCCCAA | 512 | CAGAGTGCACAA | 845 |
| | | ACGGTTGCGCGG | | ACAGTCGCAAGA | |
| | | CCTTTTTATGCAC | | CCATTCTACGCAC | |
| | | AG | | AG | |
| AQTVATPFR | 240 | CAGAGTGCCCAA | 513 | CAGAGTGCACAA | 846 |
| | | ACTGTTGCTACGC | | ACAGTCGCAACA | |
| | | CGTTTAGGGCAC | | CCATTCAGAGCA | |
| | | AG | | CAG | |
| AQTVTQLFK | 241 | CAGAGTGCCCAA | 514 | CAGAGTGCACAA | 847 |
| | | ACGGTGACGCAG | | ACAGTCACACAA | |
| | | TTGTTTAAGGCAC | | CTCTTCAAAGCAC | |
| | | AG | | AG | |
| AQVHVGSVY | 165 | CAGAGTGCCCAA | 515 | CAGAGTGCACAA | 848 |
| | | GTTCATGTTGGGA | | GTCCACGTCGGA | |
| | | GTGTTTATGCACA | | AGCGTCTACGCA | |
| | | G | | CAG | |
| AQVLAGYNM | 242 | CAGAGTGCCCAA | 516 | CAGAGTGCACAA | 849 |
| | | GTTCTTGCTGGGT | | GTCCTCGCAGGA | |
| | | ATAATATGGCAC | | TACAACATGGCA | |
| | | AG | | CAG | |
| AQVSEARVR | 243 | CAGAGTGCCCAA | 517 | CAGAGTGCACAA | 850 |
| | | GTTTCTGAGGCG | | GTCAGCGAAGCA | |
| | | AGGGTTAGGGCA | | AGAGTCAGAGCA | |
| | | CAG | | CAG | |
| AQVVVGYSQ | 244 | CAGAGTGCCCAA | 518 | CAGAGTGCACAA | 851 |
| | | GTTGTGGTGGGTT | | GTCGTCGTCGGAT | |
| | | ATAGTCAGGCAC | | ACAGCCAAGCAC | |
| | | AG | | AG | |
| AQWAAGYNV | 245 | CAGAGTGCCCAA | 519 | CAGAGTGCACAA | 852 |
| | | TGGGCTGCTGGG | | TGGGCAGCAGGA | |
| | | TATAATGTGGCA | | TACAACGTCGCA | |
| | | CAG | | CAG | |
| AQWELSNGY | 246 | CAGAGTGCCCAA | 520 | CAGAGTGCACAA | 853 |
| | | TGGGAGCTGAGT | | TGGGAACTCAGC | |
| | | AATGGGTATGCA | | AACGGATACGCA | |
| | | CAG | | CAG | |
| AQWEVKGGY | 247 | CAGAGTGCCCAA | 521 | CAGAGTGCACAA | 854 |
| | | TGGGAGGTGAAG | | TGGGAAGTCAAA | |
| | | GGGGGTTATGCA | | GGAGGATACGCA | |
| | | CAG | | CAG | |
| AQWEVKRGY | 248 | CAGAGTGCCCAA | 522 | CAGAGTGCACAA | 855 |
| | | TGGGAGGTGAAG | | TGGGAAGTCAAA | |
| | | CGGGGGTATGCA | | AGAGGATACGCA | |
| | | CAG | | CAG | |
| AQWEVQSGF | 249 | CAGAGTGCCCAA | 523 | CAGAGTGCACAA | 856 |
| | | TGGGAGGTTCAG | | TGGGAAGTCCAA | |
| | | TCTGGGTTTGCAC | | AGCGGATTCGCA | |
| | | AG | | CAG | |
| AQWEVRGGY | 250 | CAGAGTGCCCAA | 524 | CAGAGTGCACAA | 857 |
| | | TGGGAGGTTCGT | | TGGGAAGTCAGA | |
| | | GGTGGTTATGCA | | GGAGGATACGCA | |
| | | CAG | | CAG | |
| AQWEVTSGW | 251 | CAGAGTGCCCAA | 525 | CAGAGTGCACAA | 858 |
| | | TGGGAGGTGACG | | TGGGAAGTCACA | |
| | | AGTGGTTGGGCA | | AGCGGATGGGCA | |
| | | CAG | | CAG | |
| AQWGAPSHG | 252 | CAGAGTGCCCAA | 526 | CAGAGTGCACAA | 859 |
| | | TGGGGGGCGCCG | | TGGGGAGCACCA | |
| | | AGTCATGGGGCA | | AGCCACGGAGCA | |
| | | CAG | | CAG | |
| AQWMELGSS | 253 | CAGAGTGCCCAA | 527 | CAGAGTGCACAA | 860 |
| | | TGGATGGAGCTT | | TGGATGGAACTC | |
| | | GGTAGTTCGGCA | | GGAAGCAGCGCA | |
| | | CAG | | CAG | |
| AQWMFGGSG | 254 | CAGAGTGCCCAA | 528 | CAGAGTGCACAA | 861 |
| | | TGGATGTTTGGG | | TGGATGTTCGGA | |
| | | GGTAGTGGGGCA | | GGAAGCGGAGCA | |
| | | CAG | | CAG | |
| AQWMLGGAQ | 255 | CAGAGTGCCCAA | 529 | CAGAGTGCACAA | 862 |
| | | TGGATGCTGGGG | | TGGATGCTCGGA | |
| | | GGGGCGCAGGCA | | GGAGCACAAGCA | |
| | | CAG | | CAG | |
| AQWPTAYDA | 256 | CAGAGTGCCCAA | 530 | CAGAGTGCACAA | 863 |
| | | TGGCCGACTGCTT | | TGGCCAACAGCA | |
| | | ATGATGCGGCAC | | TACGACGCAGCA | |
| | | AG | | CAG | |
| AQWPTSYDA | 62 | CAGAGTGCCCAA | 531 | CAGAGTGCACAA | 864 |
| | | TGGCCTACGAGTT | | TGGCCAACAAGC | |
| | | ATGATGCTGCAC | | TACGACGCAGCA | |
| | | AG | | CAG | |
| AQWQVQTGF | 257 | CAGAGTGCCCAA | 532 | CAGAGTGCACAA | 865 |
| | | TGGCAGGTTCAG | | TGGCAAGTCCAA | |
| | | ACGGGGTTTGCA | | ACAGGATTCGCA | |
| | | CAG | | CAG | |
| AQWSTEGGY | 258 | CAGAGTGCCCAA | 533 | CAGAGTGCACAA | 866 |
| | | TGGTCGACTGAG | | TGGAGCACAGAA | |
| | | GGTGGGTATGCA | | GGAGGATACGCA | |
| | | CAG | | CAG | |
| AQWTAAGGY | 259 | CAGAGTGCCCAA | 534 | CAGAGTGCACAA | 867 |
| | | TGGACTGCTGCG | | TGGACAGCAGCA | |
| | | GGTGGTTATGCA | | GGAGGATACGCA | |
| | | CAG | | CAG | |
| AQWTTESGY | 260 | CAGAGTGCCCAA | 535 | CAGAGTGCACAA | 868 |
| | | TGGACGACGGAG | | TGGACAACAGAA | |
| | | TCGGGTTATGCAC | | AGCGGATACGCA | |
| | | AG | | CAG | |
| AQWVYGSSH | 261 | CAGAGTGCCCAA | 536 | CAGAGTGCACAA | 869 |
| | | TGGGTTTATGGG | | TGGGTCTACGGA | |
| | | AGTTCGCATGCA | | AGCAGCCACGCA | |
| | | CAG | | CAG | |
| AQYLAGYTV | 262 | CAGAGTGCCCAA | 537 | CAGAGTGCACAA | 870 |
| | | TATTTGGCGGGGT | | TACCTCGCAGGA | |
| | | ATACGGTGGCAC | | TACACAGTCGCA | |
| | | AG | | CAG | |
| AQYLKGYSV | 152 | CAGAGTGCCCAA | 538 | CAGAGTGCACAA | 871 |
| | | TATCTGAAGGGG | | TACCTCAAAGGA | |
| | | TATTCTGTGGCAC | | TACAGCGTCGCA | |
| | | AG | | CAG | |
| AQYLSGYNT | 263 | CAGAGTGCCCAA | 539 | CAGAGTGCACAA | 872 |
| | | TATTTGTCGGGTT | | TACCTCAGCGGA | |
| | | ATAATACGGCAC | | TACAACACAGCA | |
| | | AG | | CAG | |
| DGAAATTGW | 264 | CAGAGTGATGGC | 540 | CAGAGTGACGGA | 873 |
| | | GCTGCGGCGACT | | GCAGCAGCAACA | |
| | | ACTGGGTGGGCA | | ACAGGATGGGCA | |
| | | CAG | | CAG | |
| DGAGGTSGW | 151 | CAGAGTGATGGC | 541 | CAGAGTGACGGA | 874 |
| | | GCGGGTGGGACG | | GCAGGAGGAACA | |
| | | AGTGGTTGGGCA | | AGCGGATGGGCA | |
| | | CAG | | CAG | |
| DGAGTTSGW | 265 | CAGAGTGATGGC | 542 | CAGAGTGACGGA | 875 |
| | | GCGGGTACTACTT | | GCAGGAACAACA | |
| | | CGGGTTGGGCAC | | AGCGGATGGGCA | |
| | | AG | | CAG | |
| DGAHGLSGW | 266 | CAGAGTGATGGC | 543 | CAGAGTGACGGA | 876 |
| | | GCTCATGGGCTGT | | GCACACGGACTC | |
| | | CGGGGTGGGCAC | | AGCGGATGGGCA | |
| | | AG | | CAG | |
| DGAHVGLSS | 267 | CAGAGTGATGGC | 544 | CAGAGTGACGGA | 877 |
| | | GCTCATGTTGGGC | | GCACACGTCGGA | |
| | | TGTCGTCGGCAC | | CTCAGCAGCGCA | |
| | | AG | | CAG | |
| DGARTVLQL | 268 | CAGAGTGATGGC | 545 | CAGAGTGACGGA | 878 |
| | | GCTCGGACGGTG | | GCAAGAACAGTC | |
| | | CTTCAGTTGGCAC | | CTCCAACTCGCAC | |
| | | AG | | AG | |
| DGEYQKPFR | 269 | CAGAGTGATGGC | 546 | CAGAGTGACGGA | 879 |
| | | GAGTATCAGAAG | | GAATACCAAAAA | |
| | | CCGTTTAGGGCA | | CCATTCAGAGCA | |
| | | CAG | | CAG | |
| DGGGTTTGW | 270 | CAGAGTGATGGC | 547 | CAGAGTGACGGA | 880 |
| | | GGTGGGACTACG | | GGAGGAACAACA | |
| | | ACGGGGTGGGCA | | ACAGGATGGGCA | |
| | | CAG | | CAG | |
| DGHATSMGW | 271 | CAGAGTGATGGC | 548 | CAGAGTGACGGA | 881 |
| | | CATGCGACGAGT | | CACGCAACAAGC | |
| | | ATGGGTTGGGCA | | ATGGGATGGGCA | |
| | | CAG | | CAG | |
| DGKGSTQGW | 272 | CAGAGTGATGGC | 549 | CAGAGTGACGGA | 882 |
| | | AAGGGTTCGACG | | AAAGGAAGCACA | |
| | | CAGGGGTGGGCA | | CAAGGATGGGCA | |
| | | CAG | | CAG | |
| DGKQYQLSS | 92 | CAGAGTGATGGC | 550 | CAGAGTGACGGA | 883 |
| | | AAGCAGTATCAG | | AAACAATACCAA | |
| | | CTGTCTTCGGCAC | | CTCAGCAGCGCA | |
| | | AG | | CAG | |
| DGNGGLKGW | 167 | CAGAGTGATGGC | 551 | CAGAGTGACGGA | 884 |
| | | AATGGTGGGTTG | | AACGGAGGACTC | |
| | | AAGGGGTGGGCA | | AAAGGATGGGCA | |
| | | CAG | | CAG | |
| DGQGGLSGW | 273 | CAGAGTGATGGC | 552 | CAGAGTGACGGA | 885 |
| | | CAGGGGGGTTTG | | CAAGGAGGACTC | |
| | | TCTGGGTGGGCA | | AGCGGATGGGCA | |
| | | CAG | | CAG | |
| DGQHFAPPR | 110 | CAGAGTGATGGC | 553 | CAGAGTGACGGA | 886 |
| | | CAGCATTTTGCTC | | CAACACTTCGCA | |
| | | CGCCGCGGGCAC | | CCACCAAGAGCA | |
| | | AG | | CAG | |
| DGRATKTLY | 274 | CAGAGTGATGGC | 554 | CAGAGTGACGGA | 887 |
| | | CGTGCGACTAAG | | AGAGCAACAAAA | |
| | | ACGCTTTATGCAC | | ACACTCTACGCA | |
| | | AG | | CAG | |
| DGRNALTGW | 275 | CAGAGTGATGGC | 555 | CAGAGTGACGGA | 888 |
| | | CGTAATGCGTTG | | AGAAACGCACTC | |
| | | ACGGGGTGGGCA | | ACAGGATGGGCA | |
| | | CAG | | CAG | |
| DGRRQVIQL | 276 | CAGAGTGATGGC | 556 | CAGAGTGACGGA | 889 |
| | | AGGAGGCAGGTG | | AGAAGACAAGTC | |
| | | ATTCAGCTGGCA | | ATCCAACTCGCA | |
| | | CAG | | CAG | |
| DGRVYGLSS | 277 | CAGAGTGATGGC | 557 | CAGAGTGACGGA | 890 |
| | | AGGGTTTATGGTC | | AGAGTCTACGGA | |
| | | TTTCGTCGGCACA | | CTCAGCAGCGCA | |
| | | G | | CAG | |
| DGSGRTTGW | 147 | CAGAGTGATGGC | 558 | CAGAGTGACGGA | 891 |
| | | AGTGGGCGTACG | | AGCGGAAGAACA | |
| | | ACGGGTTGGGCA | | ACAGGATGGGCA | |
| | | CAG | | CAG | |
| DGSGTTRGW | 114 | CAGAGTGATGGC | 559 | CAGAGTGACGGA | 892 |
| | | TCTGGTACGACG | | AGCGGAACAACA | |
| | | CGGGGTTGGGCA | | AGAGGATGGGCA | |
| | | CAG | | CAG | |
| DGSGTVSGW | 278 | CAGAGTGATGGC | 560 | CAGAGTGACGGA | 893 |
| | | TCGGGTACGGTT | | AGCGGAACAGTC | |
| | | AGTGGGTGGGCA | | AGCGGATGGGCA | |
| | | CAG | | CAG | |
| DGSPEKPFR | 160 | CAGAGTGATGGC | 561 | CAGAGTGACGGA | 894 |
| | | AGTCCGGAGAAG | | AGCCCAGAAAAA | |
| | | CCGTTTCGGGCAC | | CCATTCAGAGCA | |
| | | AG | | CAG | |
| DGSQSTTGW | 136 | CAGAGTGATGGC | 562 | CAGAGTGACGGA | 895 |
| | | AGTCAGTCTACTA | | AGCCAAAGCACA | |
| | | CGGGGTGGGCAC | | ACAGGATGGGCA | |
| | | AG | | CAG | |
| DGSSFYPPK | 127 | CAGAGTGATGGC | 563 | CAGAGTGACGGA | 896 |
| | | AGTAGTTTTTATC | | AGCAGCTTCTACC | |
| | | CTCCTAAGGCAC | | CACCAAAAGCAC | |
| | | AG | | AG | |
| DGSSSYYDA | 64 | CAGAGTGATGGC | 564 | CAGAGTGACGGA | 897 |
| | | AGTAGTTCTTATT | | AGCAGCAGCTAC | |
| | | ATGATGCGGCAC | | TACGACGCAGCA | |
| | | AG | | CAG | |
| DGSTERPFR | 99 | CAGAGTGATGGC | 565 | CAGAGTGACGGA | 898 |
| | | TCTACGGAGAGG | | AGCACAGAAAGA | |
| | | CCGTTTAGGGCA | | CCATTCAGAGCA | |
| | | CAG | | CAG | |
| DGTAARLSS | 132 | CAGAGTGATGGC | 566 | CAGAGTGACGGA | 899 |
| | | ACCGCGGCTCGG | | ACAGCAGCAAGA | |
| | | CTGTCGTCGGCAC | | CTCAGCAGCGCA | |
| | | AG | | CAG | |
| DGTADKPFR | 63 | CAGAGTGATGGC | 567 | CAGAGTGACGGA | 900 |
| | | ACCGCTGATAAG | | ACAGCAGACAAA | |
| | | CCGTTTCGGGCAC | | CCATTCAGAGCA | |
| | | AG | | CAG | |
| DGTADRPFR | 155 | CAGAGTGATGGC | 568 | CAGAGTGACGGA | 901 |
| | | ACGGCGGATCGT | | ACAGCAGACAGA | |
| | | CCTTTTCGGGCAC | | CCATTCAGAGCA | |
| | | AG | | CAG | |
| DGTAERPFR | 140 | CAGAGTGATGGC | 569 | CAGAGTGACGGA | 902 |
| | | ACCGCGGAGAGG | | ACAGCAGAAAGA | |
| | | CCTTTTAGGGCAC | | CCATTCAGAGCA | |
| | | AG | | CAG | |
| DGTAIHLSS | 67 | CAGAGTGATGGC | 570 | CAGAGTGACGGA | 903 |
| | | ACCGCGATTCATC | | ACAGCAATCCAC | |
| | | TTTCGTCTGCACA | | CTCAGCAGCGCA | |
| | | G | | CAG | |
| DGTAIYLSS | 279 | CAGAGTGATGGC | 571 | CAGAGTGACGGA | 904 |
| | | ACCGCGATTTATC | | ACAGCAATCTAC | |
| | | TGTCTTCTGCACA | | CTCAGCAGCGCA | |
| | | G | | CAG | |
| DGTALMLSS | 280 | CAGAGTGATGGC | 572 | CAGAGTGACGGA | 905 |
| | | ACCGCTCTTATGT | | ACAGCACTCATG | |
| | | TGTCGTCTGCACA | | CTCAGCAGCGCA | |
| | | G | | CAG | |
| DGTASISGW | 281 | CAGAGTGATGGC | 573 | CAGAGTGACGGA | 906 |
| | | ACCGCGAGTATT | | ACAGCAAGCATC | |
| | | AGTGGTTGGGCA | | AGCGGATGGGCA | |
| | | CAG | | CAG | |
| DGTASTSGW | 282 | CAGAGTGATGGC | 574 | CAGAGTGACGGA | 907 |
| | | ACCGCGTCGACG | | ACAGCAAGCACA | |
| | | AGTGGGTGGGCA | | AGCGGATGGGCA | |
| | | CAG | | CAG | |
| DGTASVTGW | 283 | CAGAGTGATGGC | 575 | CAGAGTGACGGA | 908 |
| | | ACCGCGTCGGTG | | ACAGCAAGCGTC | |
| | | ACGGGGTGGGCA | | ACAGGATGGGCA | |
| | | CAG | | CAG | |
| DGTASYYDS | 61 | CAGAGTGATGGC | 576 | CAGAGTGACGGA | 909 |
| | | ACCGCGAGTTATT | | ACAGCAAGCTAC | |
| | | ATGATTCTGCACA | | TACGACAGCGCA | |
| | | G | | CAG | |
| DGTATTMGW | 284 | CAGAGTGATGGC | 577 | CAGAGTGACGGA | 910 |
| | | ACCGCGACGACG | | ACAGCAACAACA | |
| | | ATGGGGTGGGCA | | ATGGGATGGGCA | |
| | | CAG | | CAG | |
| DGTATTTGW | 285 | CAGAGTGATGGC | 578 | CAGAGTGACGGA | 911 |
| | | ACCGCGACGACG | | ACAGCAACAACA | |
| | | ACGGGTTGGGCA | | ACAGGATGGGCA | |
| | | CAG | | CAG | |
| DGTAYRLSS | 286 | CAGAGTGATGGC | 579 | CAGAGTGACGGA | 912 |
| | | ACCGCGTATCGTT | | ACAGCATACAGA | |
| | | TGTCGTCTGCACA | | CTCAGCAGCGCA | |
| | | G | | CAG | |
| DGTDKMWSI | 287 | CAGAGTGATGGC | 580 | CAGAGTGACGGA | 913 |
| | | ACCGATAAGATG | | ACAGACAAAATG | |
| | | TGGAGTATTGCA | | TGGAGCATCGCA | |
| | | CAG | | CAG | |
| DGTGGIKGW | 131 | CAGAGTGATGGC | 581 | CAGAGTGACGGA | 914 |
| | | ACCGGTGGTATT | | ACAGGAGGAATC | |
| | | AAGGGGTGGGCA | | AAAGGATGGGCA | |
| | | CAG | | CAG | |
| DGTGGIMGW | 288 | CAGAGTGATGGC | 582 | CAGAGTGACGGA | 915 |
| | | ACCGGGGGGATT | | ACAGGAGGAATC | |
| | | ATGGGTTGGGCA | | ATGGGATGGGCA | |
| | | CAG | | CAG | |
| DGTGGISGW | 289 | CAGAGTGATGGC | 583 | CAGAGTGACGGA | 916 |
| | | ACCGGTGGGATT | | ACAGGAGGAATC | |
| | | TCGGGGTGGGCA | | AGCGGATGGGCA | |
| | | CAG | | CAG | |
| DGTGGLAGW | 290 | CAGAGTGATGGC | 584 | CAGAGTGACGGA | 917 |
| | | ACCGGGGGTCTT | | ACAGGAGGACTC | |
| | | GCTGGTTGGGCA | | GCAGGATGGGCA | |
| | | CAG | | CAG | |
| DGTGGLHGW | 291 | CAGAGTGATGGC | 585 | CAGAGTGACGGA | 918 |
| | | ACCGGGGGGTTG | | ACAGGAGGACTC | |
| | | CATGGTTGGGCA | | CACGGATGGGCA | |
| | | CAG | | CAG | |
| DGTGGLQGW | 292 | CAGAGTGATGGC | 586 | CAGAGTGACGGA | 919 |
| | | ACCGGGGGTTTG | | ACAGGAGGACTC | |
| | | CAGGGTTGGGCA | | CAAGGATGGGCA | |
| | | CAG | | CAG | |
| DGTGGLRGW | 154 | CAGAGTGATGGC | 587 | CAGAGTGACGGA | 920 |
| | | ACCGGGGGTTTG | | ACAGGAGGACTC | |
| | | CGTGGTTGGGCA | | AGAGGATGGGCA | |
| | | CAG | | CAG | |
| DGTGGLSGW | 293 | CAGAGTGATGGC | 588 | CAGAGTGACGGA | 921 |
| | | ACCGGTGGGTTG | | ACAGGAGGACTC | |
| | | TCGGGTTGGGCA | | AGCGGATGGGCA | |
| | | CAG | | CAG | |
| DGTGGLTGW | 294 | CAGAGTGATGGC | 589 | CAGAGTGACGGA | 922 |
| | | ACCGGGGGGTTG | | ACAGGAGGACTC | |
| | | ACGGGTTGGGCA | | ACAGGATGGGCA | |
| | | CAG | | CAG | |
| DGTGGTKGW | 107 | CAGAGTGATGGC | 590 | CAGAGTGACGGA | 923 |
| | | ACCGGTGGGACT | | ACAGGAGGAACA | |
| | | AAGGGTTGGGCA | | AAAGGATGGGCA | |
| | | CAG | | CAG | |
| DGTGGTSGW | 295 | CAGAGTGATGGC | 591 | CAGAGTGACGGA | 924 |
| | | ACCGGGGGGACG | | ACAGGAGGAACA | |
| | | AGTGGTTGGGCA | | AGCGGATGGGCA | |
| | | CAG | | CAG | |
| DGTGGVHGW | 296 | CAGAGTGATGGC | 592 | CAGAGTGACGGA | 925 |
| | | ACCGGTGGGGTG | | ACAGGAGGAGTC | |
| | | CATGGTTGGGCA | | CACGGATGGGCA | |
| | | CAG | | CAG | |
| DGTGGVMGW | 297 | CAGAGTGATGGC | 593 | CAGAGTGACGGA | 926 |
| | | ACCGGTGGTGTT | | ACAGGAGGAGTC | |
| | | ATGGGGTGGGCA | | ATGGGATGGGCA | |
| | | CAG | | CAG | |
| DGTGGVSGW | 298 | CAGAGTGATGGC | 594 | CAGAGTGACGGA | 927 |
| | | ACCGGGGGGGTG | | ACAGGAGGAGTC | |
| | | TCTGGTTGGGCAC | | AGCGGATGGGCA | |
| | | AG | | CAG | |
| DGTGGVTGW | 299 | CAGAGTGATGGC | 595 | CAGAGTGACGGA | 928 |
| | | ACCGGTGGTGTG | | ACAGGAGGAGTC | |
| | | ACGGGGTGGGCA | | ACAGGATGGGCA | |
| | | CAG | | CAG | |
| DGTGGVYGW | 300 | CAGAGTGATGGC | 596 | CAGAGTGACGGA | 929 |
| | | ACCGGTGGTGTG | | ACAGGAGGAGTC | |
| | | TATGGGTGGGCA | | TACGGATGGGCA | |
| | | CAG | | CAG | |
| DGTGNLQGW | 301 | CAGAGTGATGGC | 597 | CAGAGTGACGGA | 930 |
| | | ACCGGTAATTTGC | | ACAGGAAACCTC | |
| | | AGGGTTGGGCAC | | CAAGGATGGGCA | |
| | | AG | | CAG | |
| DGTGNLRGW | 133 | CAGAGTGATGGC | 598 | CAGAGTGACGGA | 931 |
| | | ACCGGGAATCTT | | ACAGGAAACCTC | |
| | | AGGGGGTGGGCA | | AGAGGATGGGCA | |
| | | CAG | | CAG | |
| DGTGNLSGW | 302 | CAGAGTGATGGC | 599 | CAGAGTGACGGA | 932 |
| | | ACCGGGAATTTG | | ACAGGAAACCTC | |
| | | AGTGGGTGGGCA | | AGCGGATGGGCA | |
| | | CAG | | CAG | |
| DGTGNTHGW | 72 | CAGAGTGATGGC | 600 | CAGAGTGACGGA | 933 |
| | | ACCGGGAATACT | | ACAGGAAACACA | |
| | | CATGGGTGGGCA | | CACGGATGGGCA | |
| | | CAG | | CAG | |
| DGTGNTRGW | 94 | CAGAGTGATGGC | 601 | CAGAGTGACGGA | 934 |
| | | ACCGGGAATACT | | ACAGGAAACACA | |
| | | CGGGGGTGGGCA | | AGAGGATGGGCA | |
| | | CAG | | CAG | |
| DGTGNTSGW | 137 | CAGAGTGATGGC | 602 | CAGAGTGACGGA | 935 |
| | | ACCGGTAATACT | | ACAGGAAACACA | |
| | | AGTGGTTGGGCA | | AGCGGATGGGCA | |
| | | CAG | | CAG | |
| DGTGNVSGW | 303 | CAGAGTGATGGC | 603 | CAGAGTGACGGA | 936 |
| | | ACCGGGAATGTG | | ACAGGAAACGTC | |
| | | TCGGGGTGGGCA | | AGCGGATGGGCA | |
| | | CAG | | CAG | |
| DGTGNVTGW | 69 | CAGAGTGATGGC | 604 | CAGAGTGACGGA | 937 |
| | | ACCGGTAATGTG | | ACAGGAAACGTC | |
| | | ACGGGGTGGGCA | | ACAGGATGGGCA | |
| | | CAG | | CAG | |
| DGTGQLVGW | 304 | CAGAGTGATGGC | 605 | CAGAGTGACGGA | 938 |
| | | ACCGGGCAGCTT | | ACAGGACAACTC | |
| | | GTGGGTTGGGCA | | GTCGGATGGGCA | |
| | | CAG | | CAG | |
| DGTGQTIGW | 305 | CAGAGTGATGGC | 606 | CAGAGTGACGGA | 939 |
| | | ACCGGTCAGACG | | ACAGGACAAACA | |
| | | ATTGGTTGGGCA | | ATCGGATGGGCA | |
| | | CAG | | CAG | |
| DGTGQVTGW | 68 | CAGAGTGATGGC | 607 | CAGAGTGACGGA | 940 |
| | | ACCGGGCAGGTG | | ACAGGACAAGTC | |
| | | ACTGGGTGGGCA | | ACAGGATGGGCA | |
| | | CAG | | CAG | |
| DGTGRLTGW | 159 | CAGAGTGATGGC | 608 | CAGAGTGACGGA | 941 |
| | | ACCGGTCGGTTG | | ACAGGAAGACTC | |
| | | ACGGGTTGGGCA | | ACAGGATGGGCA | |
| | | CAG | | CAG | |
| DGTGRTVGW | 117 | CAGAGTGATGGC | 609 | CAGAGTGACGGA | 942 |
| | | ACCGGTCGGACT | | ACAGGAAGAACA | |
| | | GTTGGGTGGGCA | | GTCGGATGGGCA | |
| | | CAG | | CAG | |
| DGTGSGMMT | 306 | CAGAGTGATGGC | 610 | CAGAGTGACGGA | 943 |
| | | ACCGGTTCGGGT | | ACAGGAAGCGGA | |
| | | ATGATGACGGCA | | ATGATGACAGCA | |
| | | CAG | | CAG | |
| DGTGSISGW | 307 | CAGAGTGATGGC | 611 | CAGAGTGACGGA | 944 |
| | | ACCGGGTCGATT | | ACAGGAAGCATC | |
| | | AGTGGGTGGGCA | | AGCGGATGGGCA | |
| | | CAG | | CAG | |
| DGTGSLAGW | 308 | CAGAGTGATGGC | 612 | CAGAGTGACGGA | 945 |
| | | ACCGGTTCTTTGG | | ACAGGAAGCCTC | |
| | | CGGGGTGGGCAC | | GCAGGATGGGCA | |
| | | AG | | CAG | |
| DGTGSLNGW | 309 | CAGAGTGATGGC | 613 | CAGAGTGACGGA | 946 |
| | | ACCGGGTCTTTGA | | ACAGGAAGCCTC | |
| | | ATGGGTGGGCAC | | AACGGATGGGCA | |
| | | AG | | CAG | |
| DGTGSLQGW | 310 | CAGAGTGATGGC | 614 | CAGAGTGACGGA | 947 |
| | | ACCGGGTCGCTG | | ACAGGAAGCCTC | |
| | | CAGGGTTGGGCA | | CAAGGATGGGCA | |
| | | CAG | | CAG | |
| DGTGSLSGW | 311 | CAGAGTGATGGC | 615 | CAGAGTGACGGA | 948 |
| | | ACCGGGAGTCTG | | ACAGGAAGCCTC | |
| | | TCGGGGTGGGCA | | AGCGGATGGGCA | |
| | | CAG | | CAG | |
| DGTGSLVGW | 312 | CAGAGTGATGGC | 616 | CAGAGTGACGGA | 949 |
| | | ACCGGGTCGTTG | | ACAGGAAGCCTC | |
| | | GTGGGTTGGGCA | | GTCGGATGGGCA | |
| | | CAG | | CAG | |
| DGTGSTHGW | 119 | CAGAGTGATGGC | 617 | CAGAGTGACGGA | 950 |
| | | ACCGGGAGTACG | | ACAGGAAGCACA | |
| | | CATGGGTGGGCA | | CACGGATGGGCA | |
| | | CAG | | CAG | |
| DGTGSTKGW | 313 | CAGAGTGATGGC | 618 | CAGAGTGACGGA | 951 |
| | | ACCGGGAGTACT | | ACAGGAAGCACA | |
| | | AAGGGGTGGGCA | | AAAGGATGGGCA | |
| | | CAG | | CAG | |
| DGTGSTMGW | 314 | CAGAGTGATGGC | 619 | CAGAGTGACGGA | 952 |
| | | ACCGGTTCTACTA | | ACAGGAAGCACA | |
| | | TGGGTTGGGCAC | | ATGGGATGGGCA | |
| | | AG | | CAG | |
| DGTGSTQGW | 315 | CAGAGTGATGGC | 620 | CAGAGTGACGGA | 953 |
| | | ACCGGTAGTACG | | ACAGGAAGCACA | |
| | | CAGGGTTGGGCA | | CAAGGATGGGCA | |
| | | CAG | | CAG | |
| DGTGSTSGW | 316 | CAGAGTGATGGC | 621 | CAGAGTGACGGA | 954 |
| | | ACCGGGAGTACT | | ACAGGAAGCACA | |
| | | TCGGGGTGGGCA | | AGCGGATGGGCA | |
| | | CAG | | CAG | |
| DGTGSTTGW | 134 | CAGAGTGATGGC | 622 | CAGAGTGACGGA | 955 |
| | | ACCGGGAGTACG | | ACAGGAAGCACA | |
| | | ACGGGGTGGGCA | | ACAGGATGGGCA | |
| | | CAG | | CAG | |
| DGTGSVMGW | 317 | CAGAGTGATGGC | 623 | CAGAGTGACGGA | 956 |
| | | ACCGGTTCGGTTA | | ACAGGAAGCGTC | |
| | | TGGGGTGGGCAC | | ATGGGATGGGCA | |
| | | AG | | CAG | |
| DGTGSVTGW | 318 | CAGAGTGATGGC | 624 | CAGAGTGACGGA | 957 |
| | | ACCGGGTCTGTG | | ACAGGAAGCGTC | |
| | | ACTGGGTGGGCA | | ACAGGATGGGCA | |
| | | CAG | | CAG | |
| DGTGTLAGW | 319 | CAGAGTGATGGC | 625 | CAGAGTGACGGA | 958 |
| | | ACCGGGACGCTT | | ACAGGAACACTC | |
| | | GCGGGGTGGGCA | | GCAGGATGGGCA | |
| | | CAG | | CAG | |
| DGTGTLHGW | 320 | CAGAGTGATGGC | 626 | CAGAGTGACGGA | 959 |
| | | ACCGGTACTTTGC | | ACAGGAACACTC | |
| | | ATGGTTGGGCAC | | CACGGATGGGCA | |
| | | AG | | CAG | |
| DGTGTLKGW | 321 | CAGAGTGATGGC | 627 | CAGAGTGACGGA | 960 |
| | | ACCGGTACTCTTA | | ACAGGAACACTC | |
| | | AGGGTTGGGCAC | | AAAGGATGGGCA | |
| | | AG | | CAG | |
| DGTGTLSGW | 322 | CAGAGTGATGGC | 628 | CAGAGTGACGGA | 961 |
| | | ACCGGGACTCTG | | ACAGGAACACTC | |
| | | TCGGGTTGGGCA | | AGCGGATGGGCA | |
| | | CAG | | CAG | |
| DGTGTTLGW | 323 | CAGAGTGATGGC | 629 | CAGAGTGACGGA | 962 |
| | | ACCGGGACTACG | | ACAGGAACAACA | |
| | | CTGGGGTGGGCA | | CTCGGATGGGCA | |
| | | CAG | | CAG | |
| DGTGTTMGW | 324 | CAGAGTGATGGC | 630 | CAGAGTGACGGA | 963 |
| | | ACCGGGACTACT | | ACAGGAACAACA | |
| | | ATGGGTTGGGCA | | ATGGGATGGGCA | |
| | | CAG | | CAG | |
| DGTGTTTGW | 130 | CAGAGTGATGGC | 631 | CAGAGTGACGGA | 964 |
| | | ACCGGGACTACT | | ACAGGAACAACA | |
| | | ACGGGGTGGGCA | | ACAGGATGGGCA | |
| | | CAG | | CAG | |
| DGTGTTVGW | 74 | CAGAGTGATGGC | 632 | CAGAGTGACGGA | 965 |
| | | ACCGGTACTACG | | ACAGGAACAACA | |
| | | GTGGGGTGGGCA | | GTCGGATGGGCA | |
| | | CAG | | CAG | |
| DGTGTTYGW | 325 | CAGAGTGATGGC | 633 | CAGAGTGACGGA | 966 |
| | | ACCGGGACGACG | | ACAGGAACAACA | |
| | | TATGGTTGGGCA | | TACGGATGGGCA | |
| | | CAG | | CAG | |
| DGTGTVHGW | 326 | CAGAGTGATGGC | 634 | CAGAGTGACGGA | 967 |
| | | ACCGGTACGGTT | | ACAGGAACAGTC | |
| | | CATGGTTGGGCA | | CACGGATGGGCA | |
| | | CAG | | CAG | |
| DGTGTVQGW | 327 | CAGAGTGATGGC | 635 | CAGAGTGACGGA | 968 |
| | | ACCGGGACTGTG | | ACAGGAACAGTC | |
| | | CAGGGGTGGGCA | | CAAGGATGGGCA | |
| | | CAG | | CAG | |
| DGTGTVSGW | 328 | CAGAGTGATGGC | 636 | CAGAGTGACGGA | 969 |
| | | ACCGGTACTGTTT | | ACAGGAACAGTC | |
| | | CTGGTTGGGCAC | | AGCGGATGGGCA | |
| | | AG | | CAG | |
| DGTGTVTGW | 329 | CAGAGTGATGGC | 637 | CAGAGTGACGGA | 970 |
| | | ACCGGTACTGTTA | | ACAGGAACAGTC | |
| | | CTGGGTGGGCAC | | ACAGGATGGGCA | |
| | | AG | | CAG | |
| DGTHARLSS | 330 | CAGAGTGATGGC | 638 | CAGAGTGACGGA | 971 |
| | | ACCCATGCGAGG | | ACACACGCAAGA | |
| | | TTGTCTTCGGCAC | | CTCAGCAGCGCA | |
| | | AG | | CAG | |
| DGTHAYMAS | 153 | CAGAGTGATGGC | 639 | CAGAGTGACGGA | 972 |
| | | ACCCATGCTTATA | | ACACACGCATAC | |
| | | TGGCGTCTGCAC | | ATGGCAAGCGCA | |
| | | AG | | CAG | |
| DGTHFAPPR | 112 | CAGAGTGATGGC | 640 | CAGAGTGACGGA | 973 |
| | | ACCCATTTTGCGC | | ACACACTTCGCA | |
| | | CGCCGCGTGCAC | | CCACCAAGAGCA | |
| | | AG | | CAG | |
| DGTHIHLSS | 162 | CAGAGTGATGGC | 641 | CAGAGTGACGGA | 974 |
| | | ACCCATATTCATC | | ACACACATCCAC | |
| | | TGAGTAGTGCAC | | CTCAGCAGCGCA | |
| | | AG | | CAG | |
| DGTHIRALS | 331 | CAGAGTGATGGC | 642 | CAGAGTGACGGA | 975 |
| | | ACCCATATTAGG | | ACACACATCAGA | |
| | | GCTCTGAGTGCA | | GCACTCAGCGCA | |
| | | CAG | | CAG | |
| DGTHIRLAS | 332 | CAGAGTGATGGC | 643 | CAGAGTGACGGA | 976 |
| | | ACCCATATTCGTT | | ACACACATCAGA | |
| | | TGGCGAGTGCAC | | CTCGCAAGCGCA | |
| | | AG | | CAG | |
| DGTHLQPFR | 333 | CAGAGTGATGGC | 644 | CAGAGTGACGGA | 977 |
| | | ACCCATCTGCAG | | ACACACCTCCAA | |
| | | CCGTTTAGGGCA | | CCATTCAGAGCA | |
| | | CAG | | CAG | |
| DGTHSFYDA | 334 | CAGAGTGATGGC | 645 | CAGAGTGACGGA | 978 |
| | | ACCCATAGTTTTT | | ACACACAGCTTCT | |
| | | ATGATGCGGCAC | | ACGACGCAGCAC | |
| | | AG | | AG | |
| DGTHSTTGW | 145 | CAGAGTGATGGC | 646 | CAGAGTGACGGA | 979 |
| | | ACCCATTCTACTA | | ACACACAGCACA | |
| | | CGGGTTGGGCAC | | ACAGGATGGGCA | |
| | | AG | | CAG | |
| DGTHTRTGW | 90 | CAGAGTGATGGC | 647 | CAGAGTGACGGA | 980 |
| | | ACCCATACGCGG | | ACACACACAAGA | |
| | | ACGGGTTGGGCA | | ACAGGATGGGCA | |
| | | CAG | | CAG | |
| DGTHVRALS | 335 | CAGAGTGATGGC | 648 | CAGAGTGACGGA | 981 |
| | | ACCCATGTTAGG | | ACACACGTCAGA | |
| | | GCGTTGTCGGCA | | GCACTCAGCGCA | |
| | | CAG | | CAG | |
| DGTHVYMAS | 336 | CAGAGTGATGGC | 649 | CAGAGTGACGGA | 982 |
| | | ACCCATGTTTATA | | ACACACGTCTAC | |
| | | TGGCTAGTGCAC | | ATGGCAAGCGCA | |
| | | AG | | CAG | |
| DGTHVYMSS | 337 | CAGAGTGATGGC | 650 | CAGAGTGACGGA | 983 |
| | | ACCCATGTGTATA | | ACACACGTCTAC | |
| | | TGTCTAGTGCACA | | ATGAGCAGCGCA | |
| | | G | | CAG | |
| DGTIALPFK | 338 | CAGAGTGATGGC | 651 | CAGAGTGACGGA | 984 |
| | | ACCATTGCGCTTC | | ACAATCGCACTC | |
| | | CGTTTAAGGCAC | | CCATTCAAAGCA | |
| | | AG | | CAG | |
| DGTIALPFR | 339 | CAGAGTGATGGC | 652 | CAGAGTGACGGA | 985 |
| | | ACCATTGCTTTGC | | ACAATCGCACTC | |
| | | CGTTTAGGGCAC | | CCATTCAGAGCA | |
| | | AG | | CAG | |
| DGTIATRYV | 340 | CAGAGTGATGGC | 653 | CAGAGTGACGGA | 986 |
| | | ACCATTGCGACG | | ACAATCGCAACA | |
| | | CGGTATGTGGCA | | AGATACGTCGCA | |
| | | CAG | | CAG | |
| DGTIERPFR | 87 | CAGAGTGATGGC | 654 | CAGAGTGACGGA | 987 |
| | | ACCATTGAGCGG | | ACAATCGAAAGA | |
| | | CCTTTTCGTGCAC | | CCATTCAGAGCA | |
| | | AG | | CAG | |
| DGTIGYAYV | 341 | CAGAGTGATGGC | 655 | CAGAGTGACGGA | 988 |
| | | ACCATTGGTTATG | | ACAATCGGATAC | |
| | | CGTATGTTGCACA | | GCATACGTCGCA | |
| | | G | | CAG | |
| DGTIQAPFK | 342 | CAGAGTGATGGC | 656 | CAGAGTGACGGA | 989 |
| | | ACCATTCAGGCTC | | ACAATCCAAGCA | |
| | | CGTTTAAGGCAC | | CCATTCAAAGCA | |
| | | AG | | CAG | |
| DGTIRLPFK | 343 | CAGAGTGATGGC | 657 | CAGAGTGACGGA | 990 |
| | | ACCATTCGTCTTC | | ACAATCAGACTC | |
| | | CTTTTAAGGCACA | | CCATTCAAAGCA | |
| | | G | | CAG | |
| DGTISKEVG | 344 | CAGAGTGATGGC | 658 | CAGAGTGACGGA | 991 |
| | | ACCATTTCTAAGG | | ACAATCAGCAAA | |
| | | AGGTGGGGGCAC | | GAAGTCGGAGCA | |
| | | AG | | CAG | |
| DGTISQPFK | 105 | CAGAGTGATGGC | 659 | CAGAGTGACGGA | 992 |
| | | ACCATTTCGCAGC | | ACAATCAGCCAA | |
| | | CTTTTAAGGCACA | | CCATTCAAAGCA | |
| | | G | | CAG | |
| DGTKIQLSS | 146 | CAGAGTGATGGC | 660 | CAGAGTGACGGA | 993 |
| | | ACCAAGATTCAG | | ACAAAAATCCAA | |
| | | CTGTCTAGTGCAC | | CTCAGCAGCGCA | |
| | | AG | | CAG | |
| DGTKIRLSS | 111 | CAGAGTGATGGC | 661 | CAGAGTGACGGA | 994 |
| | | ACCAAGATTCGG | | ACAAAAATCAGA | |
| | | TTGTCGTCTGCAC | | CTCAGCAGCGCA | |
| | | AG | | CAG | |
| DGTKLMLSS | 157 | CAGAGTGATGGC | 662 | CAGAGTGACGGA | 995 |
| | | ACCAAGCTGATG | | ACAAAACTCATG | |
| | | TTGAGTAGTGCA | | CTCAGCAGCGCA | |
| | | CAG | | CAG | |
| DGTKLRLSS | 118 | CAGAGTGATGGC | 663 | CAGAGTGACGGA | 996 |
| | | ACCAAGTTGAGG | | ACAAAACTCAGA | |
| | | CTTAGTTCTGCAC | | CTCAGCAGCGCA | |
| | | AG | | CAG | |
| DGTKMVLQL | 142 | CAGAGTGATGGC | 664 | CAGAGTGACGGA | 997 |
| | | ACCAAGATGGTG | | ACAAAAATGGTC | |
| | | TTGCAGCTGGCA | | CTCCAACTCGCAC | |
| | | CAG | | AG | |
| DGTKSLVQL | 345 | CAGAGTGATGGC | 665 | CAGAGTGACGGA | 998 |
| | | ACCAAGAGTCTT | | ACAAAAAGCCTC | |
| | | GTGCAGCTTGCA | | GTCCAACTCGCA | |
| | | CAG | | CAG | |
| DGTKVLVQL | 122 | CAGAGTGATGGC | 666 | CAGAGTGACGGA | 999 |
| | | ACCAAGGTGCTG | | ACAAAAGTCCTC | |
| | | GTGCAGTTGGCA | | GTCCAACTCGCA | |
| | | CAG | | CAG | |
| DGTLAAPFK | 120 | CAGAGTGATGGC | 667 | CAGAGTGACGGA | 1000 |
| | | ACCTTGGCTGCTC | | ACACTCGCAGCA | |
| | | CTTTTAAGGCACA | | CCATTCAAAGCA | |
| | | G | | CAG | |
| DGTLAVNFK | 346 | CAGAGTGATGGG | 668 | CAGAGTGACGGA | 1001 |
| | | ACTTTGGCGGTG | | ACACTCGCAGTC | |
| | | AATTTTAAGGCA | | AACTTCAAAGCA | |
| | | CAG | | CAG | |
| DGTLAVPFK | 71 | CAGAGTGATGGG | 669 | CAGAGTGACGGA | 1002 |
| (PHP.eB) | | ACTTTGGCGGTGC | | ACACTCGCAGTC | |
| | | CTTTTAAGGCACA | | CCATTCAAAGCA | |
| | | G | | CAG | |
| DGTLAYPFK | 347 | CAGAGTGATGGC | 670 | CAGAGTGACGGA | 1003 |
| | | ACCCTTGCGTATC | | ACACTCGCATAC | |
| | | CTTTTAAGGCACA | | CCATTCAAAGCA | |
| | | G | | CAG | |
| DGTLERPFR | 156 | CAGAGTGATGGC | 671 | CAGAGTGACGGA | 1004 |
| | | ACCCTGGAGAGG | | ACACTCGAAAGA | |
| | | CCGTTTCGGGCAC | | CCATTCAGAGCA | |
| | | AG | | CAG | |
| DGTLEVHFK | 348 | CAGAGTGATGGG | 672 | CAGAGTGACGGA | 1005 |
| | | ACTTTGGAGGTG | | ACACTCGAAGTC | |
| | | CATTTTAAGGCAC | | CACTTCAAAGCA | |
| | | AG | | CAG | |
| DGTLLRLSS | 121 | CAGAGTGATGGC | 673 | CAGAGTGACGGA | 1006 |
| | | ACCTTGCTGAGG | | ACACTCCTCAGA | |
| | | CTGAGTAGTGCA | | CTCAGCAGCGCA | |
| | | CAG | | CAG | |
| DGTLNNPFR | 109 | CAGAGTGATGGC | 674 | CAGAGTGACGGA | 1007 |
| | | ACCTTGAATAATC | | ACACTCAACAAC | |
| | | CGTTTAGGGCAC | | CCATTCAGAGCA | |
| | | AG | | CAG | |
| DGTLQQPFR | 89 | CAGAGTGATGGC | 675 | CAGAGTGACGGA | 1008 |
| | | ACCTTGCAGCAG | | ACACTCCAACAA | |
| | | CCGTTTCGGGCAC | | CCATTCAGAGCA | |
| | | AG | | CAG | |
| DGTLSQPFR | 65 | CAGAGTGATGGC | 676 | CAGAGTGACGGA | 1009 |
| | | ACCCTGTCTCAGC | | ACACTCAGCCAA | |
| | | CTTTTAGGGCACA | | CCATTCAGAGCA | |
| | | G | | CAG | |
| DGTLSRTLW | 349 | CAGAGTGATGGC | 677 | CAGAGTGACGGA | 1010 |
| | | ACCTTGTCGCGTA | | ACACTCAGCAGA | |
| | | CGCTTTGGGCAC | | ACACTCTGGGCA | |
| | | AG | | CAG | |
| DGTLSSPFR | 350 | CAGAGTGATGGC | 678 | CAGAGTGACGGA | 1011 |
| | | ACCCTGTCTAGTC | | ACACTCAGCAGC | |
| | | CGTTTAGGGCAC | | CCATTCAGAGCA | |
| | | AG | | CAG | |
| DGTLTVPFR | 351 | CAGAGTGATGGC | 679 | CAGAGTGACGGA | 1012 |
| | | ACCTTGACGGTTC | | ACACTCACAGTC | |
| | | CTTTTCGGGCACA | | CCATTCAGAGCA | |
| | | G | | CAG | |
| DGTLVAPFR | 352 | CAGAGTGATGGC | 680 | CAGAGTGACGGA | 1013 |
| | | ACCCTTGTTGCGC | | ACACTCGTCGCA | |
| | | CGTTTAGGGCAC | | CCATTCAGAGCA | |
| | | AG | | CAG | |
| DGTMDKPFR | 70 | CAGAGTGATGGC | 681 | CAGAGTGACGGA | 1014 |
| | | ACGATGGATAAG | | ACAATGGACAAA | |
| | | CCTTTTAGGGCAC | | CCATTCAGAGCA | |
| | | AG | | CAG | |
| DGTMDRPFK | 102 | CAGAGTGATGGC | 682 | CAGAGTGACGGA | 1015 |
| | | ACCATGGATAGG | | ACAATGGACAGA | |
| | | CCGTTTAAGGCA | | CCATTCAAAGCA | |
| | | CAG | | CAG | |
| DGTMLRLSS | 148 | CAGAGTGATGGC | 683 | CAGAGTGACGGA | 1016 |
| | | ACCATGTTGCGTC | | ACAATGCTCAGA | |
| | | TTAGTTCGGCACA | | CTCAGCAGCGCA | |
| | | G | | CAG | |
| DGTMQLTGW | 353 | CAGAGTGATGGC | 684 | CAGAGTGACGGA | 1017 |
| | | ACCATGCAGCTT | | ACAATGCAACTC | |
| | | ACGGGGTGGGCA | | ACAGGATGGGCA | |
| | | CAG | | CAG | |
| DGTNGLKGW | 76 | CAGAGTGATGGC | 685 | CAGAGTGACGGA | 1018 |
| | | ACCAATGGTCTG | | ACAAACGGACTC | |
| | | AAGGGGTGGGCA | | AAAGGATGGGCA | |
| | | CAG | | CAG | |
| DGTNSISGW | 354 | CAGAGTGATGGC | 686 | CAGAGTGACGGA | 1019 |
| | | ACCAATAGTATT | | ACAAACAGCATC | |
| | | AGTGGGTGGGCA | | AGCGGATGGGCA | |
| | | CAG | | CAG | |
| DGTNSLSGW | 355 | CAGAGTGATGGC | 687 | CAGAGTGACGGA | 1020 |
| | | ACCAATTCTCTGT | | ACAAACAGCCTC | |
| | | CGGGTTGGGCAC | | AGCGGATGGGCA | |
| | | AG | | CAG | |
| DGTNSTTGW | 143 | CAGAGTGATGGC | 688 | CAGAGTGACGGA | 1021 |
| | | ACCAATTCTACG | | ACAAACAGCACA | |
| | | ACGGGTTGGGCA | | ACAGGATGGGCA | |
| | | CAG | | CAG | |
| DGTNSVTGW | 356 | CAGAGTGATGGC | 689 | CAGAGTGACGGA | 1022 |
| | | ACCAATAGTGTT | | ACAAACAGCGTC | |
| | | ACGGGTTGGGCA | | ACAGGATGGGCA | |
| | | CAG | | CAG | |
| DGTNTINGW | 124 | CAGAGTGATGGC | 690 | CAGAGTGACGGA | 1023 |
| | | ACCAATACTATTA | | ACAAACACAATC | |
| | | ATGGGTGGGCAC | | AACGGATGGGCA | |
| | | AG | | CAG | |
| DGTNTLGGW | 357 | CAGAGTGATGGC | 691 | CAGAGTGACGGA | 1024 |
| | | ACCAATACGTTG | | ACAAACACACTC | |
| | | GGGGGGTGGGCA | | GGAGGATGGGCA | |
| | | CAG | | CAG | |
| DGTNTTHGW | 113 | CAGAGTGATGGC | 692 | CAGAGTGACGGA | 1025 |
| | | ACCAATACTACTC | | ACAAACACAACA | |
| | | ATGGGTGGGCAC | | CACGGATGGGCA | |
| | | AG | | CAG | |
| DGTNYRLSS | 358 | CAGAGTGATGGC | 693 | CAGAGTGACGGA | 1026 |
| | | ACCAATTATAGG | | ACAAACTACAGA | |
| | | CTGTCGAGTGCA | | CTCAGCAGCGCA | |
| | | CAG | | CAG | |
| DGTQALSGW | 359 | CAGAGTGATGGC | 694 | CAGAGTGACGGA | 1027 |
| | | ACCCAGGCGCTG | | ACACAAGCACTC | |
| | | TCGGGGTGGGCA | | AGCGGATGGGCA | |
| | | CAG | | CAG | |
| DGTQFRLSS | 129 | CAGAGTGATGGC | 695 | CAGAGTGACGGA | 1028 |
| | | ACCCAGTTTAGGT | | ACACAATTCAGA | |
| | | TGTCTTCGGCACA | | CTCAGCAGCGCA | |
| | | G | | CAG | |
| DGTQFSPPR | 108 | CAGAGTGATGGC | 696 | CAGAGTGACGGA | 1029 |
| | | ACCCAGTTTAGTC | | ACACAATTCAGC | |
| | | CTCCGCGTGCAC | | CCACCAAGAGCA | |
| | | AG | | CAG | |
| DGTQGLKGW | 158 | CAGAGTGATGGC | 697 | CAGAGTGACGGA | 1030 |
| | | ACCCAGGGGCTG | | ACACAAGGACTC | |
| | | AAGGGGTGGGCA | | AAAGGATGGGCA | |
| | | CAG | | CAG | |
| DGTQTTSGW | 360 | CAGAGTGATGGC | 698 | CAGAGTGACGGA | 1031 |
| | | ACCCAGACTACG | | ACACAAACAACA | |
| | | AGTGGGTGGGCA | | AGCGGATGGGCA | |
| | | CAG | | CAG | |
| DGTRALTGW | 361 | CAGAGTGATGGC | 699 | CAGAGTGACGGA | 1032 |
| | | ACCAGGGCTCTT | | ACAAGAGCACTC | |
| | | ACGGGTTGGGCA | | ACAGGATGGGCA | |
| | | CAG | | CAG | |
| DGTRFSLSS | 362 | CAGAGTGATGGC | 700 | CAGAGTGACGGA | 1033 |
| | | ACCCGGTTTTCGC | | ACAAGATTCAGC | |
| | | TTTCGAGTGCACA | | CTCAGCAGCGCA | |
| | | G | | CAG | |
| DGTRGLSGW | 363 | CAGAGTGATGGC | 701 | CAGAGTGACGGA | 1034 |
| | | ACCAGGGGGTTG | | ACAAGAGGACTC | |
| | | TCGGGGTGGGCA | | AGCGGATGGGCA | |
| | | CAG | | CAG | |
| DGTRIGLSS | 364 | CAGAGTGATGGC | 702 | CAGAGTGACGGA | 1035 |
| | | ACCAGGATTGGG | | ACAAGAATCGGA | |
| | | CTGAGTAGTGCA | | CTCAGCAGCGCA | |
| | | CAG | | CAG | |
| DGTRLHLAS | 365 | CAGAGTGATGGC | 703 | CAGAGTGACGGA | 1036 |
| | | ACCAGGCTTCATC | | ACAAGACTCCAC | |
| | | TGGCGAGTGCAC | | CTCGCAAGCGCA | |
| | | AG | | CAG | |
| DGTRLHLSS | 366 | CAGAGTGATGGC | 704 | CAGAGTGACGGA | 1037 |
| | | ACCAGGCTTCATC | | ACAAGACTCCAC | |
| | | TGTCGTCGGCAC | | CTCAGCAGCGCA | |
| | | AG | | CAG | |
| DGTRLLLSS | 367 | CAGAGTGATGGC | 705 | CAGAGTGACGGA | 1038 |
| | | ACCCGTTTGCTGC | | ACAAGACTCCTC | |
| | | TGTCGAGTGCAC | | CTCAGCAGCGCA | |
| | | AG | | CAG | |
| DGTRLMLSS | 368 | CAGAGTGATGGC | 706 | CAGAGTGACGGA | 1039 |
| | | ACCCGTTTGATGC | | ACAAGACTCATG | |
| | | TTTCTAGTGCACA | | CTCAGCAGCGCA | |
| | | G | | CAG | |
| DGTRLNLSS | 369 | CAGAGTGATGGC | 707 | CAGAGTGACGGA | 1040 |
| | | ACCCGTTTGAATC | | ACAAGACTCAAC | |
| | | TTAGTTCGGCACA | | CTCAGCAGCGCA | |
| | | G | | CAG | |
| DGTRMVVQL | 370 | CAGAGTGATGGC | 708 | CAGAGTGACGGA | 1041 |
| | | ACCCGGATGGTT | | ACAAGAATGGTC | |
| | | GTTCAGCTTGCAC | | GTCCAACTCGCA | |
| | | AG | | CAG | |
| DGTRNMYEG | 135 | CAGAGTGATGGC | 709 | CAGAGTGACGGA | 1042 |
| | | ACCCGTAATATGT | | ACAAGAAACATG | |
| | | ATGAGGGGGCAC | | TACGAAGGAGCA | |
| | | AG | | CAG | |
| DGTRSITGW | 371 | CAGAGTGATGGC | 710 | CAGAGTGACGGA | 1043 |
| | | ACCAGGAGTATT | | ACAAGAAGCATC | |
| | | ACGGGGTGGGCA | | ACAGGATGGGCA | |
| | | CAG | | CAG | |
| DGTRSLHGW | 372 | CAGAGTGATGGC | 711 | CAGAGTGACGGA | 1044 |
| | | ACCAGGAGTTTG | | ACAAGAAGCCTC | |
| | | CATGGGTGGGCA | | CACGGATGGGCA | |
| | | CAG | | CAG | |
| DGTRSTTGW | 373 | CAGAGTGATGGC | 712 | CAGAGTGACGGA | 1045 |
| | | ACCCGGAGTACT | | ACAAGAAGCACA | |
| | | ACGGGTTGGGCA | | ACAGGATGGGCA | |
| | | CAG | | CAG | |
| DGTRTTTGW | 106 | CAGAGTGATGGC | 713 | CAGAGTGACGGA | 1046 |
| | | ACCCGTACTACG | | ACAAGAACAACA | |
| | | ACGGGTTGGGCA | | ACAGGATGGGCA | |
| | | CAG | | CAG | |
| DGTRTVTGW | 374 | CAGAGTGATGGC | 714 | CAGAGTGACGGA | 1047 |
| | | ACCCGGACGGTG | | ACAAGAACAGTC | |
| | | ACTGGTTGGGCA | | ACAGGATGGGCA | |
| | | CAG | | CAG | |
| DGTRTVVQL | 375 | CAGAGTGATGGC | 715 | CAGAGTGACGGA | 1048 |
| | | ACCCGTACTGTG | | ACAAGAACAGTC | |
| | | GTGCAGTTGGCA | | GTCCAACTCGCA | |
| | | CAG | | CAG | |
| DGTRVHLSS | 376 | CAGAGTGATGGC | 716 | CAGAGTGACGGA | 1049 |
| | | ACCCGGGTGCAT | | ACAAGAGTCCAC | |
| | | CTTTCTAGTGCAC | | CTCAGCAGCGCA | |
| | | AG | | CAG | |
| DGTSFPYAR | 86 | CAGAGTGATGGC | 717 | CAGAGTGACGGA | 1050 |
| | | ACCTCGTTTCCGT | | ACAAGCTTCCCAT | |
| | | ATGCTCGGGCAC | | ACGCAAGAGCAC | |
| | | AG | | AG | |
| DGTSFTPPK | 81 | CAGAGTGATGGC | 718 | CAGAGTGACGGA | 1051 |
| | | ACCTCGTTTACGC | | ACAAGCTTCACA | |
| | | CGCCTAAGGCAC | | CCACCAAAAGCA | |
| | | AG | | CAG | |
| DGTSFTPPR | 88 | CAGAGTGATGGC | 719 | CAGAGTGACGGA | 1052 |
| | | ACCTCGTTTACTC | | ACAAGCTTCACA | |
| | | CGCCGCGGGCAC | | CCACCAAGAGCA | |
| | | AG | | CAG | |
| DGTSGLHGW | 377 | CAGAGTGATGGC | 720 | CAGAGTGACGGA | 1053 |
| | | ACCTCTGGGTTGC | | ACAAGCGGACTC | |
| | | ATGGGTGGGCAC | | CACGGATGGGCA | |
| | | AG | | CAG | |
| DGTSGLKGW | 101 | CAGAGTGATGGC | 721 | CAGAGTGACGGA | 1054 |
| | | ACCAGTGGGCTT | | ACAAGCGGACTC | |
| | | AAGGGGTGGGCA | | AAAGGATGGGCA | |
| | | CAG | | CAG | |
| DGTSIHLSS | 378 | CAGAGTGATGGC | 722 | CAGAGTGACGGA | 1055 |
| | | ACCTCGATTCATT | | ACAAGCATCCAC | |
| | | TGAGTAGTGCAC | | CTCAGCAGCGCA | |
| | | AG | | CAG | |
| DGTSIMLSS | 379 | CAGAGTGATGGC | 723 | CAGAGTGACGGA | 1056 |
| | | ACCTCGATTATGT | | ACAAGCATCATG | |
| | | TGAGTTCTGCACA | | CTCAGCAGCGCA | |
| | | G | | CAG | |
| DGTSLRLSS | 166 | CAGAGTGATGGC | 724 | CAGAGTGACGGA | 1057 |
| | | ACCTCTTTGCGGC | | ACAAGCCTCAGA | |
| | | TTTCTTCTGCACA | | CTCAGCAGCGCA | |
| | | G | | CAG | |
| DGTSNYGAR | 380 | CAGAGTGATGGC | 725 | CAGAGTGACGGA | 1058 |
| | | ACCTCTAATTATG | | ACAAGCAACTAC | |
| | | GGGCGCGGGCAC | | GGAGCAAGAGCA | |
| | | AG | | CAG | |
| DGTSSYYDA | 381 | CAGAGTGATGGC | 726 | CAGAGTGACGGA | 1059 |
| | | ACCAGTTCGTATT | | ACAAGCAGCTAC | |
| | | ATGATGCGGCAC | | TACGACGCAGCA | |
| | | AG | | CAG | |
| DGTSSYYDS | 59 | CAGAGTGATGGC | 727 | CAGAGTGACGGA | 1060 |
| | | ACCTCGAGTTATT | | ACAAGCAGCTAC | |
| | | ATGATTCTGCACA | | TACGACAGCGCA | |
| | | G | | CAG | |
| DGTSTISGW | 382 | CAGAGTGATGGC | 728 | CAGAGTGACGGA | 1061 |
| | | ACCTCTACGATTT | | ACAAGCACAATC | |
| | | CTGGTTGGGCAC | | AGCGGATGGGCA | |
| | | AG | | CAG | |
| DGTSTITGW | 383 | CAGAGTGATGGC | 729 | CAGAGTGACGGA | 1062 |
| | | ACCAGTACTATTA | | ACAAGCACAATC | |
| | | CGGGTTGGGCAC | | ACAGGATGGGCA | |
| | | AG | | CAG | |
| DGTSTLHGW | 384 | CAGAGTGATGGC | 730 | CAGAGTGACGGA | 1063 |
| | | ACCTCGACGTTGC | | ACAAGCACACTC | |
| | | ATGGGTGGGCAC | | CACGGATGGGCA | |
| | | AG | | CAG | |
| DGTSTLRGW | 385 | CAGAGTGATGGC | 731 | CAGAGTGACGGA | 1064 |
| | | ACCTCTACTCTGC | | ACAAGCACACTC | |
| | | GTGGGTGGGCAC | | AGAGGATGGGCA | |
| | | AG | | CAG | |
| DGTSTLSGW | 386 | CAGAGTGATGGC | 732 | CAGAGTGACGGA | 1065 |
| | | ACCTCGACGCTGT | | ACAAGCACACTC | |
| | | CGGGGTGGGCAC | | AGCGGATGGGCA | |
| | | AG | | CAG | |
| DGTSYVPPK | 97 | CAGAGTGATGGC | 733 | CAGAGTGACGGA | 1066 |
| | | ACCTCTTATGTGC | | ACAAGCTACGTC | |
| | | CGCCGAAGGCAC | | CCACCAAAAGCA | |
| | | AG | | CAG | |
| DGTSYVPPR | 78 | CAGAGTGATGGC | 734 | CAGAGTGACGGA | 1067 |
| | | ACCAGTTATGTGC | | ACAAGCTACGTC | |
| | | CGCCTCGGGCAC | | CCACCAAGAGCA | |
| | | AG | | CAG | |
| DGTTATYYK | 387 | CAGAGTGATGGC | 735 | CAGAGTGACGGA | 1068 |
| | | ACCACGGCGACT | | ACAACAGCAACA | |
| | | TATTATAAGGCA | | TACTACAAAGCA | |
| | | CAG | | CAG | |
| DGTTFTPPR | 79 | CAGAGTGATGGC | 736 | CAGAGTGACGGA | 1069 |
| | | ACCACTTTTACTC | | ACAACATTCACA | |
| | | CTCCTCGGGCAC | | CCACCAAGAGCA | |
| | | AG | | CAG | |
| DGTTLAPFR | 388 | CAGAGTGATGGC | 737 | CAGAGTGACGGA | 1070 |
| | | ACCACTCTGGCTC | | ACAACACTCGCA | |
| | | CTTTTAGGGCACA | | CCATTCAGAGCA | |
| | | G | | CAG | |
| DGTTLVPPR | 116 | CAGAGTGATGGC | 738 | CAGAGTGACGGA | 1071 |
| | | ACCACTTTGGTTC | | ACAACACTCGTC | |
| | | CGCCGCGTGCAC | | CCACCAAGAGCA | |
| | | AG | | CAG | |
| DGTTSKTLW | 389 | CAGAGTGATGGC | 739 | CAGAGTGACGGA | 1072 |
| | | ACCACGAGTAAG | | ACAACAAGCAAA | |
| | | ACGCTTTGGGCA | | ACACTCTGGGCA | |
| | | CAG | | CAG | |
| DGTTSRTLW | 390 | CAGAGTGATGGC | 740 | CAGAGTGACGGA | 1073 |
| | | ACCACTTCTAGG | | ACAACAAGCAGA | |
| | | ACTTTGTGGGCAC | | ACACTCTGGGCA | |
| | | AG | | CAG | |
| DGTTTRSLY | 391 | CAGAGTGATGGC | 741 | CAGAGTGACGGA | 1074 |
| | | ACCACGACTCGT | | ACAACAACAAGA | |
| | | AGTTTGTATGCAC | | AGCCTCTACGCA | |
| | | AG | | CAG | |
| DGTTTTTGW | 392 | CAGAGTGATGGC | 742 | CAGAGTGACGGA | 1075 |
| | | ACCACTACGACT | | ACAACAACAACA | |
| | | ACGGGTTGGGCA | | ACAGGATGGGCA | |
| | | CAG | | CAG | |
| DGTTTYGAR | 77 | CAGAGTGATGGC | 743 | CAGAGTGACGGA | 1076 |
| | | ACCACTACGTAT | | ACAACAACATAC | |
| | | GGGGCTCGTGCA | | GGAGCAAGAGCA | |
| | | CAG | | CAG | |
| DGTTWTPPR | 139 | CAGAGTGATGGC | 744 | CAGAGTGACGGA | 1077 |
| | | ACCACTTGGACG | | ACAACATGGACA | |
| | | CCGCCGCGTGCA | | CCACCAAGAGCA | |
| | | CAG | | CAG | |
| DGTTYMLSS | 393 | CAGAGTGATGGC | 745 | CAGAGTGACGGA | 1078 |
| | | ACCACGTATATG | | ACAACATACATG | |
| | | CTTAGTAGTGCAC | | CTCAGCAGCGCA | |
| | | AG | | CAG | |
| DGTTYVPPR | 75 | CAGAGTGATGGC | 746 | CAGAGTGACGGA | 1079 |
| | | ACCACGTATGTTC | | ACAACATACGTC | |
| | | CTCCGCGGGCAC | | CCACCAAGAGCA | |
| | | AG | | CAG | |
| DGTVANPFR | 394 | CAGAGTGATGGC | 747 | CAGAGTGACGGA | 1080 |
| | | ACCGTGGCGAAT | | ACAGTCGCAAAC | |
| | | CCTTTTCGGGCAC | | CCATTCAGAGCA | |
| | | AG | | CAG | |
| DGTVDRPFK | 395 | CAGAGTGATGGC | 748 | CAGAGTGACGGA | 1081 |
| | | ACCGTGGATCGG | | ACAGTCGACAGA | |
| | | CCTTTTAAGGCAC | | CCATTCAAAGCA | |
| | | AG | | CAG | |
| DGTVIHLSS | 73 | CAGAGTGATGGC | 749 | CAGAGTGACGGA | 1082 |
| | | ACCGTTATTCATC | | ACAGTCATCCAC | |
| | | TGAGTAGTGCAC | | CTCAGCAGCGCA | |
| | | AG | | CAG | |
| DGTVILLSS | 396 | CAGAGTGATGGC | 750 | CAGAGTGACGGA | 1083 |
| | | ACCGTTATTCTGT | | ACAGTCATCCTCC | |
| | | TGTCGAGTGCAC | | TCAGCAGCGCAC | |
| | | AG | | AG | |
| DGTVIMLSS | 397 | CAGAGTGATGGC | 751 | CAGAGTGACGGA | 1084 |
| | | ACCGTGATTATGC | | ACAGTCATCATG | |
| | | TGTCGAGTGCAC | | CTCAGCAGCGCA | |
| | | AG | | CAG | |
| DGTVLHLSS | 398 | CAGAGTGATGGC | 752 | CAGAGTGACGGA | 1085 |
| | | ACCGTGCTTCATT | | ACAGTCCTCCACC | |
| | | TGTCGTCTGCACA | | TCAGCAGCGCAC | |
| | | G | | AG | |
| DGTVLMLSS | 399 | CAGAGTGATGGC | 753 | CAGAGTGACGGA | 1086 |
| | | ACCGTTTTGATGC | | ACAGTCCTCATGC | |
| | | TGAGTAGTGCAC | | TCAGCAGCGCAC | |
| | | AG | | AG | |
| DGTVLVPFR | 150 | CAGAGTGATGGC | 754 | CAGAGTGACGGA | 1087 |
| | | ACCGTGTTGGTGC | | ACAGTCCTCGTCC | |
| | | CGTTTAGGGCAC | | CATTCAGAGCAC | |
| | | AG | | AG | |
| DGTVPYLAS | 400 | CAGAGTGATGGC | 755 | CAGAGTGACGGA | 1088 |
| | | ACCGTTCCGTATC | | ACAGTCCCATAC | |
| | | TTGCTTCTGCACA | | CTCGCAAGCGCA | |
| | | G | | CAG | |
| DGTVPYLSS | 401 | CAGAGTGATGGC | 756 | CAGAGTGACGGA | 1089 |
| | | ACCGTGCCGTATT | | ACAGTCCCATAC | |
| | | TGTCTTCGGCACA | | CTCAGCAGCGCA | |
| | | G | | CAG | |
| DGTVRVPFR | 164 | CAGAGTGATGGC | 757 | CAGAGTGACGGA | 1090 |
| | | ACCGTTCGTGTGC | | ACAGTCAGAGTC | |
| | | CGTTTAGGGCAC | | CCATTCAGAGCA | |
| | | AG | | CAG | |
| DGTVSMPFK | 402 | CAGAGTGATGGC | 758 | CAGAGTGACGGA | 1091 |
| | | ACCGTGTCGATG | | ACAGTCAGCATG | |
| | | CCGTTTAAGGCA | | CCATTCAAAGCA | |
| | | CAG | | CAG | |
| DGTVSNPFR | 403 | CAGAGTGATGGC | 759 | CAGAGTGACGGA | 1092 |
| | | ACCGTGTCTAATC | | ACAGTCAGCAAC | |
| | | CGTTTAGGGCAC | | CCATTCAGAGCA | |
| | | AG | | CAG | |
| DGTVSTRWV | 404 | CAGAGTGATGGC | 760 | CAGAGTGACGGA | 1093 |
| | | ACCGTTTCTACGC | | ACAGTCAGCACA | |
| | | GTTGGGTGGCAC | | AGATGGGTCGCA | |
| | | AG | | CAG | |
| DGTVTTTGW | 405 | CAGAGTGATGGC | 761 | CAGAGTGACGGA | 1094 |
| | | ACCGTGACGACG | | ACAGTCACAACA | |
| | | ACTGGGTGGGCA | | ACAGGATGGGCA | |
| | | CAG | | CAG | |
| DGTVTVTGW | 406 | CAGAGTGATGGC | 762 | CAGAGTGACGGA | 1095 |
| | | ACCGTGACGGTT | | ACAGTCACAGTC | |
| | | ACGGGGTGGGCA | | ACAGGATGGGCA | |
| | | CAG | | CAG | |
| DGTVWVPPR | 407 | CAGAGTGATGGC | 763 | CAGAGTGACGGA | 1096 |
| | | ACCGTTTGGGTGC | | ACAGTCTGGGTC | |
| | | CTCCTAGGGCAC | | CCACCAAGAGCA | |
| | | AG | | CAG | |
| DGTVYRLSS | 408 | CAGAGTGATGGC | 764 | CAGAGTGACGGA | 1097 |
| | | ACCGTTTATAGGT | | ACAGTCTACAGA | |
| | | TGTCGAGTGCAC | | CTCAGCAGCGCA | |
| | | AG | | CAG | |
| DGTYARLSS | 409 | CAGAGTGATGGC | 765 | CAGAGTGACGGA | 1098 |
| | | ACCTATGCGCGTT | | ACATACGCAAGA | |
| | | TGTCTTCTGCACA | | CTCAGCAGCGCA | |
| | | G | | CAG | |
| DGTYGNKLW | 410 | CAGAGTGATGGC | 766 | CAGAGTGACGGA | 1099 |
| | | ACCTATGGTAAT | | ACATACGGAAAC | |
| | | AAGTTGTGGGCA | | AAACTCTGGGCA | |
| | | CAG | | CAG | |
| DGTYIHLSS | 411 | CAGAGTGATGGC | 767 | CAGAGTGACGGA | 1100 |
| | | ACCTATATTCATC | | ACATACATCCAC | |
| | | TGTCTTCGGCACA | | CTCAGCAGCGCA | |
| | | G | | CAG | |
| DGTYSTSGW | 412 | CAGAGTGATGGC | 768 | CAGAGTGACGGA | 1101 |
| | | ACCTATTCGACG | | ACATACAGCACA | |
| | | AGTGGGTGGGCA | | AGCGGATGGGCA | |
| | | CAG | | CAG | |
| DGVHPGLSS | 104 | CAGAGTGATGGC | 769 | CAGAGTGACGGA | 1102 |
| | | GTGCATCCTGGG | | GTCCACCCAGGA | |
| | | CTTTCGAGTGCAC | | CTCAGCAGCGCA | |
| | | AG | | CAG | |
| DGVVALLAS | 413 | CAGAGTGATGGC | 770 | CAGAGTGACGGA | 1103 |
| | | GTGGTTGCGTTGC | | GTCGTCGCACTCC | |
| | | TTGCTAGTGCACA | | TCGCAAGCGCAC | |
| | | G | | AG | |
| DGYVGVGSL | 414 | CAGAGTGATGGC | 771 | CAGAGTGACGGA | 1104 |
| | | TATGTGGGTGTTG | | TACGTCGGAGTC | |
| | | GTAGTTTGGCAC | | GGAAGCCTCGCA | |
| | | AG | | CAG | |

[0361] Primer pools were produced by Twist biosciences using solid-phase synthesis and were used to generate a balanced library of 666 nucleotide variants by PCR amplification of CAP C-terminus and Gibson assembly as described in FIG. 27. 666 primers were provided a 1 fmole each, resulting in 0.6 pmole (regular PCR requires ˜25 pmole of primer). Primerless amplification on capsid gBlock template was performed over 10 cycles. Forward and reverse primers were added, followed by an additional 10, 15 or 20 PCR cycles. Constructs were then cloned into AAV9 backbone plasmids by Gibson/RCA (like regular libraries).

[0362] NGS analysis of SYN- and GFAP-driven AAV libraries produced with the pooled DNA showed a good correlation between the codon variants of each peptide, suggesting that the DNA sequence itself had little influence on virus production (FIG. 28 and FIG. 29). The pooled synthetic library was injected intravenously to C57BL/6 mice (5e11 VG per mouse, N=9), BALB/C mice (5e11 VG per mouse, N=6) and to rats (5e12 VG per rat, N=6), and after one month in-life RNA was extracted from the brain and spinal cord, and DNA was extracted from liver and heart tissue samples for biodistribution analysis (FIG. 30). Because the Synapsin and GFAP promoters are not fully active in non-CNS tissue, DNA was analyzed instead of RNA in peripheral organs. The initial focus was on the C57BL/6 mouse analysis because this is the mouse strain in which library evolution was performed.

[0363] The enrichment score of each capsid was determined by NGS analysis and defined as the ratio of reads per million (RPM) in the target tissue versus RPM in the inoculum. An example of analysis performed on the control capsids is shown in FIG. 31A. As expected from the published data, the PHP.B and PHP.eB (aka, PHP.N) capsids allowed significantly higher RNA expression in neurons compared to the AAV9 parental capsid (8-fold and 25-fold, respectively). There was a very high correlation between the codon variants of each peptide species in each animal (r=0.92, 0.93 and 0.95), confirming the robustness of the NGS assay (FIG. 31B-FIG. 31D).

[0364] An example of enrichment analysis is presented in FIG. 32A-FIG. 36. The 333 capsid variants are ranked by average brain enrichment score from all animals, and the individual enrichment values are indicated by a color scale. As indicated by the position of the reference capsids, a group of novel variants showed a higher enrichment score than the PHP.eB benchmark capsid in both neurons (Syn-driven) and astrocytes (GFAP-driven). Interestingly, many variants showed a different enrichment score in neurons vs. astrocytes, as indicated by the medium level of correlation between Syn- and GFAP-driven RNA. This suggests that certain capsids display an enhanced tropism for neurons, and others for astrocytes (FIG. 33).

[0365] A group of 38 capsids showed potentially interesting properties based on their tropism for neurons, astrocytes or both (Table 8A and Table 8B) (FIG. 38) and showed a strong consensus peptide sequence similarity, different between neuron- and astrocyte-targeting variants (FIG. 45A-FIG. 45C and FIG. 46A-FIG. 46B).

TABLE 8A
TOP 38 candidates from C57BL/6 screen #1 (N = 3)

| | | | SEQ ID | SYN | GFAP |
|---|---|---|---|---|---|
| Groups | variant | peptide | NO: | ranking | ranking |
| A | 9p32 | DGTAIHLSS | 67 | 15, 16 | 113, 133 |
| B | 9p35 | DGTSSYYDS | 59 | 1, 3 | 565, 581 |
| | 9p36 | DGSSSYYDA | 64 | 10, 11 | 591, 594 |
| | 9p37 | DGTASYYDS | 61 | 5, 6 | 553, 560 |
| C | 9p26 | DGTTTYGAR | 77 | 225, 262 | 49, 56 |
| D | 9p2 | AQNGNPGRW | 84 | 156, 160 | 38, 44 |
| | 9p13 | AQGENPGRW | 96 | 77, 87 | 7, 13 |
| | 9p30 | AQPEGSARW | 60 | 2, 4 | 154, 160 |
| E | 9p1 | AQGSWNPPA | 80 | 348, 361 | 8, 15 |
| | 9p14 | AQGTWNPPA | 82 | 448, 467 | 14, 17 |
| F | 9p29 | AQFPTNYDS | 66 | 14, 19 | 490, 537 |
| | 9p31 | AQWPTSYDA | 62 | 7, 9 | 290, 304 |
| G | 9p3 | AQTTEKPWL | 83 | 53, 72 | 35, 70 |
| | 9p15 | AQTTDRPFL | 85 | 206, 219 | 26, 43 |
| H | 9p10 | DGTRTTTGW | 106 | 161, 220 | 10, 22 |
| | 9p18 | DGTGGIKGW | 131 | 346, 388 | 41, 68 |
| | 9p19 | DGTGNTRGW | 94 | 322, 340 | 45, 54 |
| | 9p20 | DGTHTRTGW | 90 | 380, 427 | 31, 39 |
| | 9p23 | DGTNGLKGW | 76 | 132, 153 | 5, 16 |
| | 9p33 | DGTGQVTGW | 68 | 18, 33 | 172, 213 |
| | 9p38 | DGTGNVTGW | 69 | 20, 31 | 117, 137 |
| I | 9p11 | DGTTFTPPR | 79 | 183, 199 | 11, 19 |
| | 9p12 | DGTTYVPPR | 75 | 146, 154 | 4, 9 |
| | 9p24 | DGTSFTPPK | 81 | 210, 243 | 29, 40 |
| | 9p25 | DGTSFTPPR | 88 | 250, 273 | 28, 37 |
| | 9p27 | DGTTWTPPR | 139 | 567, 570 | 46, 59 |
| | 9p28 | DGTSYVPPR | 78 | 162, 179 | 20, 25 |
| J | 9p4 | DGTADRPFR | 155 | 109, 118 | 48, 57 |
| | 9p9 | DGTMDRPFK | 102 | 102, 113 | 23 ,34 |
| | 9p16 | DGTADKPFR | 63 | 8, 12 | 1, 6 |
| | 9p17 | DGTAERPFR | 140 | 106, 138 | 42, 50 |
| | 9p21 | DGTIERPFR | 87 | 186, 235 | 21, 33 |
| | 9p34 | DGTMDKPFR | 70 | 21, 23 | 107, 112 |
| K | 9p5 | DGTISQPFK | 105 | 184, 193 | 12, 18 |
| | 9p6 | DGTLAAPFK | 120 | 110, 112 | 27, 30 |
| | 9p7 | DGTLQQPFR | 89 | 46, 57 | 32, 47 |
| | 9p8 | DGTLSQPFR | 65 | 13, 17 | 2, 3 |
| | 9p22 | DGTLNNPFR | 109 | 30, 41 | 24, 36 |
| Ref. | PHPN | DGTLAVPFK | 71 | 22, 24 | 51, 60 |
| | PHPB | AQTLAVPFK | 168 | 253, 261 | 61, 62 |
| | wtAAV9 | AQ | | 630, 631 | 611, 620 |

TABLE 8B
Variant 9 mer and encoding sequences

| | | SEQ | NNK | SEQ | NNM | SEQ |
|---|---|---|---|---|---|---|
| | 9 mer | ID | nucleotide | ID | nucleotide | ID |
| variant | peptide | NO: | sequences | NO: | sequences | NO: |
| 9p1 | AQGSWNPPA | 80 | GCCCAAGGTT | 1105 | GCACAAGGAAG | 1143 |
| | | | CGTGGAATCC | | CTGGAACCCACC | |
| | | | GCCGGCG | | AGCA | |
| 9p2 | AQNGNPGRW | 84 | GCCCAAAATG | 1106 | GCACAAAACGG | 1144 |
| | | | GTAATCCGGG | | AAACCCAGGAA | |
| | | | GCGGTGG | | GATGG | |
| 9p3 | AQTIEKPWL | 83 | GCCCAAACGA | 1107 | GCACAAACAAC | 1145 |
| | | | CTGAGAAGCC | | AGAAAAACCAT | |
| | | | GTGGCTG | | GGCTC | |
| 9p4 | DGTADRPFR | 155 | GATGGCACGG | 1108 | GACGGAACAGC | 1146 |
| | | | CGGATCGTCCT | | AGACAGACCATT | |
| | | | TTTCGG | | CAGA | |
| 9p5 | DGTISQPFK | 105 | GATGGCACCA | 1109 | GACGGAACAAT | 1147 |
| | | | TTTCGCAGCCT | | CAGCCAACCATT | |
| | | | TTTAAG | | CAAA | |
| 9p6 | DGTLAAPFK | 120 | GATGGCACCTT | 1110 | GACGGAACACTC | 1148 |
| | | | GGCTGCTCCTT | | GCAGCACCATTC | |
| | | | TTAAG | | AAA | |
| 9p7 | DGTLQQPFR | 89 | GATGGCACCTT | 1111 | GACGGAACACTC | 1149 |
| | | | GCAGCAGCCG | | CAACAACCATTC | |
| | | | TTTCGG | | AGA | |
| 9p8 | DGTLSQPFR | 65 | GATGGCACCC | 1112 | GACGGAACACTC | 1150 |
| | | | TGTCTCAGCCT | | AGCCAACCATTC | |
| | | | TTTAGG | | AGA | |
| 9p9 | DGTMDRPFK | 102 | GATGGCACCA | 1113 | GACGGAACAAT | 1151 |
| | | | TGGATAGGCC | | GGACAGACCATT | |
| | | | GTTTAAG | | CAAA | |
| 9p10 | DGTRTTTGW | 106 | GATGGCACCC | 1114 | GACGGAACAAG | 1152 |
| | | | GTACTACGAC | | AACAACAACAG | |
| | | | GGGTTGG | | GATGG | |
| 9p11 | DGTTFTPPR | 79 | GATGGCACCA | 1115 | GACGGAACAAC | 1153 |
| | | | CTTTTACTCCT | | ATTCACACCACC | |
| | | | CCTCGG | | AAGA | |
| 9p12 | DGTTYVPPR | 75 | GATGGCACCA | 1116 | GACGGAACAAC | 1154 |
| | | | CGTATGTTCCT | | ATACGTCCCACC | |
| | | | CCGCGG | | AAGA | |
| 9p13 | AQGENPGRW | 96 | GCCCAAGGGG | 1117 | GCACAAGGAGA | 1155 |
| | | | AGAATCCGGG | | AAACCCAGGAA | |
| | | | TAGGTGG | | GATGG | |
| 9p14 | AQGTWNPPA | 82 | GCCCAAGGTA | 1118 | GCACAAGGAAC | 1156 |
| | | | CTTGGAATCCG | | ATGGAACCCACC | |
| | | | CCGGCT | | AGCA | |
| 9p15 | AQTTDRPFL | 85 | GCCCAAACTA | 1119 | GCACAAACAAC | 1157 |
| | | | CTGATAGGCCT | | AGACAGACCATT | |
| | | | TTTTTG | | CCTC | |
| 9p16 | DGTADKPFR | 63 | GATGGCACCG | 1120 | GACGGAACAGC | 1158 |
| | | | CTGATAAGCC | | AGACAAACCATT | |
| | | | GTTTCGG | | CAGA | |
| 9p17 | DGTAERPFR | 140 | GATGGCACCG | 1121 | GACGGAACAGC | 1159 |
| | | | CGGAGAGGCC | | AGAAAGACCATT | |
| | | | TTTTAGG | | CAGA | |
| 9p18 | DGTGGIKGW | 131 | GATGGCACCG | 1122 | GACGGAACAGG | 1160 |
| | | | GTGGTATTAA | | AGGAATCAAAG | |
| | | | GGGGTGG | | GATGG | |
| 9p19 | DGTGNTRGW | 94 | GATGGCACCG | 1123 | GACGGAACAGG | 1161 |
| | | | GGAATACTCG | | AAACACAAGAG | |
| | | | GGGGTGG | | GATGG | |
| 9p20 | DGTHTRTGW | 90 | GATGGCACCC | 1124 | GACGGAACACA | 1162 |
| | | | ATACGCGGAC | | CACAAGAACAG | |
| | | | GGGTTGG | | GATGG | |
| 9p21 | DGTIERPFR | 87 | GATGGCACCA | 1125 | GACGGAACAAT | 1163 |
| | | | TTGAGCGGCCT | | CGAAAGACCATT | |
| | | | TTTCGT | | CAGA | |
| 9p22 | DGTLNNPFR | 109 | GATGGCACCTT | 1126 | GACGGAACACTC | 1164 |
| | | | GAATAATCCG | | AACAACCCATTC | |
| | | | TTTAGG | | AGA | |
| 9p23 | DGTNGLKGW | 76 | GATGGCACCA | 1127 | GACGGAACAAA | 1165 |
| | | | ATGGTCTGAA | | CGGACTCAAAG | |
| | | | GGGGTGG | | GATGG | |
| 9p24 | DGTSFTPPK | 81 | GATGGCACCT | 1128 | GACGGAACAAG | 1166 |
| | | | CGTTTACGCCG | | CTTCACACCACC | |
| | | | CCTAAG | | AAAA | |
| 9p25 | DGTSFTPPR | 88 | GATGGCACCT | 1129 | GACGGAACAAG | 1167 |
| | | | CGTTTACTCCG | | CTTCACACCACC | |
| | | | CCGCGG | | AAGA | |
| 9p26 | DGTTTYGAR | 77 | GATGGCACCA | 1130 | GACGGAACAAC | 1168 |
| | | | CTACGTATGG | | AACATACGGAG | |
| | | | GGCTCGT | | CAAGA | |
| 9p27 | DGTTWTPPR | 139 | GATGGCACCA | 1131 | GACGGAACAAC | 1169 |
| | | | CTTGGACGCC | | ATGGACACCACC | |
| | | | GCCGCGT | | AAGA | |
| 9p28 | DGTSYVPPR | 78 | GATGGCACCA | 1132 | GACGGAACAAG | 1170 |
| | | | GTTATGTTCCT | | CTACGTCCCACC | |
| | | | CCGAGG | | AAGA | |
| 9p29 | AQFPTNYDS | 66 | GCCCAATTTCC | 1133 | GCACAATTCCCA | 1171 |
| | | | TACGAATTATG | | ACAAACTACGAC | |
| | | | ATTCT | | AGC | |
| 9p30 | AQPEGSARW | 60 | GCCCAACCTG | 1134 | GCACAACCAGA | 1172 |
| | | | AGGGTAGTGC | | AGGAAGCGCAA | |
| | | | GAGGTGG | | GATGG | |
| 9p31 | AQWPTSYDA | 62 | GCCCAATGGC | 1135 | GCACAATGGCCA | 1173 |
| | | | CTACGAGTTAT | | ACAAGCTACGAC | |
| | | | GATGCT | | GCA | |
| 9p32 | DGTAIHLSS | 67 | GATGGCACCG | 1136 | GACGGAACAGC | 1174 |
| | | | CGATTCATCTT | | AATCCACCTCAG | |
| | | | TCGTCT | | CAGC | |
| 9p33 | DGTGQVTGW | 68 | GATGGCACCG | 1137 | GACGGAACAGG | 1175 |
| | | | GGCAGGTGAC | | ACAAGTCACAG | |
| | | | TGGGTGG | | GATGG | |
| 9p34 | DGTMDKPFR | 70 | GATGGCACGA | 1138 | GACGGAACAAT | 1176 |
| | | | TGGATAAGCC | | GGACAAACCATT | |
| | | | TTTTAGG | | CAGA | |
| 9p35 | DGTSSYYDS | 59 | GATGGCACCT | 1139 | GACGGAACAAG | 1177 |
| | | | CGAGTTATTAT | | CAGCTACTACGA | |
| | | | GATTCT | | CAGC | |
| 9p36 | DGSSSYYDA | 64 | GATGGCAGTA | 1140 | GACGGAAGCAG | 1178 |
| | | | GTTCTTATTAT | | CAGCTACTACGA | |
| | | | GATGCG | | CGCA | |
| 9p37 | DGTASYYDS | 61 | GATGGCACCG | 1141 | GACGGAACAGC | 1179 |
| | | | CGAGTTATTAT | | AAGCTACTACGA | |
| | | | GATTCT | | CAGC | |
| 9p38 | DGTGNVTGW | 69 | GATGGCACCG | 1142 | GACGGAACAGG | 1180 |
| | | | GTAATGTGAC | | AAACGTCACAG | |
| | | | GGGGTGG | | GATGG | |
| AAV9 | AQ | | AGTGCTCAGG | 54 | AGTGCCCAAGCA | 53 |
| | | | CACAGGCGCA | | CAGGCGCAGAC | |
| | | | GACC | | C | |
| PHPN | DGTLAVPFK | 71 | GATGGGACTTT | 56 | GACGGAACACTC | 55 |
| | | | GGCGGTGCCTT | | GCAGTCCCATTC | |
| | | | TTAAG | | AAA | |
| PHPB | AQTLAVPFK | 168 | GCCCAAACTTT | 58 | GCACAAACACTC | 57 |
| | | | GGCGGTGCCTT | | GCAGTCCCATTC | |
| | | | TTAAG | | AAA | |

### Example 11. Phylogenetic Grouping

[0366] Phylogenetic grouping of peptide sequences showed an evident correlation between sequence homology clusters and capsid phenotypes (FIG. 37). For example, 9-mer variants with the sequence DGTxxxPFK/R (SEQ ID NO: 1181) presented a similar behavior as PHP.eB capsid (high transduction of both neurons and astrocytes), whereas variants harboring the sequence DGTxxxYDS/A (SEQ ID NO: 1182) showed a preference for neuron transduction. By contrast, peptides with the consensus DGTxxxxGW (SEQ ID NO: 1183) or CGTxxxPPR/K (SEQ ID NO: 1184) presented a higher tropism for astrocytes.

### Example 12. Capsid Testing

[0367] Capsid variants representative of distinct sequence clusters (highlighted in FIG. 37B) were chosen for individual transduction analysis in C57BL/6 mice. Each capsid was produced as a recombinant AAV packaging a self-complementary EGFP transgene driven by the ubiquitous promoter (FIG. 49A, B). Mouse groups (N=3) were injected intravenously with 6e10 VG and transduction efficiency was assessed after 1 month by quantifying EGFP mRNA in the brain, spinal cord, and liver tissue. EGFP mRNA expression was normalized using mouse TBP as a housekeeping gene, and DNA biodistribution was normalized to the single-copy mouse TfR gene (FIG. 50A-FIG. 50C). Reverse transcription was performed with the Quantitect kit and included a DNA removal treatment. All capsid variants showed a significant improvement in brain and spinal cord mRNA expression by comparison to the parent AAV9 capsid, and 3 out of 7 variants (9P16, 9P31 and 9P35) showed similar or higher transduction than the PHP.eB benchmark capsid (FIG. 49C, Table 10). The viral DNA biodistribution showed a very strong tropism of 9P31 and 9P35 for the brain and spinal cord, but all the variants showed a 40- to 260-fold increase of biodistribution compared to AAV9 (FIG. 49D, Table 10).

[0368] Expected cellular tropism was tested using an NGS screen by labeling the neuronal NeuN marker (FIG. 51). Within the cortex, the top capsids in the GFAP screen showed mostly GFP expression in NeuN-negative cells with glial morphology. Conversely, top capsids in the SYN screen showed a very high transduction of NeuN-positive cells, and the dual-specificity capsids 9P08 and 9P16—ranking high in both assays-showed mixed cell preference with multiple NeuN+ cells and glial cells.

[0369] Cellular tropism was also tested using mouse brain microvascular EC (mBMVEC) binding relative to AAV9. Results are shown in Table 9.

TABLE 9
mBMVEC binding results

| | | | BINDING TO |
|---|---|---|---|
| | | SEQUENCE | mBMVEC (fold |
| PEPTIDE | SEQUENCE | ID | over AAV9) |
| AAV9 | AQ | | 1 |
| PHP.eB | DGTLAVPFK | 71 | 153 |
| 9P03 | AQTTEKPWL | 83 | 170 |
| 9P08 | DGTLSQPFR | 65 | 349 |
| 9P09 | DGTMDRPFK | 102 | 222 |
| 9P13 | AQGENPGRW | 96 | 2.5 |
| 9P16 | DGTADKPFR | 63 | 176 |
| 9P31 | AQWPTSYDA | 62 | 2 |
| 9P32 | DGTAIHLSS | 67 | 16 |
| 9P33 | DGTGQVTGW | 68 | 5 |
| 9P36 | DGSSSYYDA | 64 | 0 |
| 9P39 | DGTGSTTGW | 134 | 2 |

[0370] Fluorescent EGFP expression in tissues of whole brain, cerebellum, cortex, and hippocampus revealed transduction patterns across a spectrum and demonstrate the identification of tissue-specific capsids (FIG. 52-FIG. 56).

[0371] The liver transduction, measured by mRNA expression and by whole tissue GFP expression, showed that several variants outperformed AAV9, which was unexpected in light of the NGS results. Some variants, such as 9P08 or 9P23, showed a relative liver detargeting by comparison with AAV9 (FIG. 57A-FIG. 57B).

TABLE 10
Brain and Spinal cord tropism

| | BRAIN EGFP mRNA* | | | | | | |
|---|---|---|---|---|---|---|---|
| | EGFP/TBP | EGFP/TBP | EGFP/TBP | group | group | Mean Fold | Fold |
| CAPSID | m1 | m2 | m3 | mean | SD | over AAV9 | SDEV |
| AAV9 | 0.11 | 0.1 | 0.15 | 0.12 | 0.03 | 1 | 0.21 |
| PHPN | 2.94 | 4.44 | 3.42 | 3.6 | 0.77 | 30 | 6.38 |
| 9P08 | 2.46 | 3.47 | 2.73 | 2.89 | 0.53 | 24 | 4.38 |
| 9P12 | 3.07 | 2.27 | 2.98 | 2.77 | 0.44 | 23 | 3.65 |
| 9P16 | 4.31 | 4.75 | 5.28 | 4.78 | 0.49 | 39 | 4.06 |
| 9P23 | 3.28 | 2.37 | 2.79 | 2.81 | 0.46 | 23 | 3.79 |
| 9P30 | 1.06 | 1.7 | 1.32 | 1.36 | 0.32 | 11 | 2.66 |
| 9P31 | 4.87 | 5.53 | 4.2 | 4.87 | 0.66 | 40 | 5.54 |
| 9P35 | 3.9 | 3.24 | 3.45 | 3.53 | 0.33 | 29 | 2.78 |
| PHPB*** | 2.68 | 2.68 | 2.68 | 2.68 | 0 | 22 | 0 |
| ctrl | 0 | 0 | 0 | 0 | 0 | 0 | 0 |

| | SPINAL CORD EGFP mRNA* | | | | | | |
|---|---|---|---|---|---|---|---|
| | EGFP/TBP | EGFP/TBP | EGFP/TBP | group | group | Mean Fold | Fold |
| CAPSID | m1 | m2 | m3 | mean | SD | over AAV9 | SD |
| AAV9 | 0.84 | 0.29 | 0.3 | 0.48 | 0.31 | 1 | 0.66 |
| PHPN | 3.36 | 5.8 | 5.4 | 4.86 | 1.31 | 10.22 | 2.75 |
| 9P08 | 4.3 | 5.62 | 4.65 | 4.86 | 0.68 | 10.22 | 1.43 |
| 9P12 | 6.09 | 5.94 | 5.78 | 5.94 | 0.16 | 12.49 | 0.33 |
| 9P16 | 4.42 | 5.31 | 5.37 | 5.04 | 0.53 | 10.6 | 1.12 |
| 9P23 | 5.41 | 5.95 | 5.04 | 5.47 | 0.46 | 11.5 | 0.96 |
| 9P30 | 1.53 | 1.83 | 2.11 | 1.82 | 0.29 | 3.84 | 0.61 |
| 9P31 | 6.92 | 7.06 | 6.94 | 6.98 | 0.08 | 14.68 | 0.16 |
| 9P35 | 4.68 | 4.81 | 4.79 | 4.76 | 0.07 | 10.02 | 0.15 |
| PHPB | 3.84 | 3.84 | 3.84 | 3.84 | 0 | 8.09 | 0 |
| ctrl | 0 | 0 | 0 | 0 | 0 | 0 | 0 |

| | BRAIN EGFP DNA** (VG/Cell) | | | | | | |
|---|---|---|---|---|---|---|---|
| | EGFP/TERT | EGFP/TERT | EGFP/TERT | Group | Group | Mean Fold | Fold |
| CAPSID | m1 | m2 | m3 | mean | SD | over AAV9 | SDEV |
| AAV9 | 0.03 | 0.04 | 0.01 | 0.03 | 0.01 | 1 | 0 |
| PHPN | 2.07 | 2.79 | 1.94 | 2.27 | 0.46 | 87 | 18 |
| P08 | 1.25 | 1.62 | 5.47 | 2.78 | 2.34 | 107 | 90 |
| P12 | 1.43 | 0.94 | 1.41 | 1.26 | 0.27 | 48 | 10 |
| P16 | 4.13 | 1.15 | 3.56 | 2.95 | 1.58 | 113 | 60 |
| P23 | 1.34 | 2.68 | 1.87 | 1.96 | 0.68 | 75 | 26 |
| P30 | 0.59 | 1.42 | 1.21 | 1.08 | 0.43 | 41 | 17 |
| P31 | 6.47 | 5.6 | 8.81 | 6.96 | 1.66 | 267 | 64 |
| P35 | 4.62 | 5.55 | 2.52 | 4.23 | 1.55 | 162 | 59 |
| PHPB | 1.5 | 1.5 | 1.5 | 1.5 | 0 | 58 | 0 |
| ctrl | 0 | 0 | 0 | 0 | 0 | 0 | 0 |
| | SPINAL CORD EGFP DNA** (VG/Cell) | | | | | | |
| | EGFP/TERT | EGFP/TERT | EGFP/TERT | Group | Group | Mean Fold | Fold |
| CAPSID | m 1 | m 2 | m 3 | AVG | SD | over AAV9 | SDEV |
| AAV9 | 0.03 | 0.04 | 0.04 | 0.03 | 0.007 | 1 | 0.2 |
| PHPN | 1.75 | 2.96 | 3.14 | 2.62 | 0.752 | 75 | 21.7 |
| P08 | 3.81 | 3.47 | 3.66 | 3.65 | 0.174 | 105 | 5 |
| P12 | 1.62 | 3.31 | 2.87 | 2.6 | 0.873 | 75 | 25.2 |
| P16 | 3.3 | 3.34 | 2.96 | 3.2 | 0.211 | 92 | 6.1 |
| P23 | 2.63 | 2.47 | 3.1 | 2.73 | 0.322 | 79 | 9.3 |
| P30 | 0.8 | 1.8 | 1.43 | 1.34 | 0.507 | 39 | 14.6 |
| P31 | 9.88 | 6.19 | 5.47 | 7.18 | 2.366 | 207 | 68.2 |
| P35 | 2.95 | 3.92 | 2.41 | 3.1 | 0.765 | 89 | 22 |
| PHPB | 1.34 | 1.34 | 1.34 | 1.34 | 0 | 39 | 0 |
| ctrl | 0 | 0 | 0 | 0 | 0 | 0 | 0 |

*EGFP mRNA expression was normalized to TBP as a housekeeping marker
**GFP DNA was normalized to single-copy TfR DNA
***N = 1

### Example 13. Multi-Rodent Testing (Cross Species)

[0372] The efficacy of the 333 capsid variants to transduce CNS was tested in other rodent strains or species (FIG. 47). Side-by-side comparison of neuron and astrocyte transduction in C57BL/6 mice, BALB/C mice and rats showed major differences in the enrichment scores of multiple variants between the two mouse strains, and even more pronounced differences between mice and rats (FIG. 48A-FIG. 48C). Strikingly, the most efficient capsid for rat brain transduction was the parental AAV9, which suggests that directed evolution “bottlenecks” capsid variants that are highly performant in one given species, as opposed to the versatility of wild-type AAV capsids.

[0373] Correlation analysis showed that some capsids shared high CNS transduction between C57BL/6 and BALB/C mice, whereas others were restricted to only one strain (FIG. 48B).

[0374] Interestingly, the PHP.B and PHP.eB capsid showed poor brain transduction in BALB/C mice, in line with a recent publication (Hordeaux et al., 2018). When focusing on the capsids that showed >10-fold increase in brain transduction, 62 variants were improved only in C57BL/6 mice, 28 variants were improved only in BALB/C mice and 30 variants showed improved brain transduction in both strains (Table 11). Consensus sequence analysis showed a “C57BL/6 signature” closely resembling the PHP.eB peptide (DGTxxxPFR (SEQ ID NO: 1185)) whereas the BALB/C signature showed a different consensus (DGTxxxxGW (SEQ ID NO: 1183)), suggesting the use of a different cellular receptor (FIG. 48C).

TABLE 11
TOP 30 candidates from C57BL/6 and BALB/C mouse screen
SYNAPSIN PROMOTER

| C57BL/6 | | | BALB/C | | |
|---|---|---|---|---|---|
| REPLICATE 1 (N = 3) | | REPLICATE 2 (N = 6) | | REPLICATE 1 (N = 6) | |
| | Brain | | Brain | | Brain |
| | Enrichment | | Enrichment | | Enrichment |
| 9-mer peptide | Factor (fold | 9-mer peptide | Factor (fold | 9-mer peptide | Factor (fold |
| insert | over AAV9) | insert | over AAV9) | insert | over AAV9) |
| DGTSSYYDS | 36.40 | AQWPTSYDA | 39.97 | DGTGSTTGW | 57.05 |
| (SEQ ID NO: | | (SEQ ID NO: | | (SEQ ID NO: | |
| 59) | | 62) | | 134) | |
| AQPEGSARW | 35.95 | AQPEGSARW | 31.83 | DGTGQVTGW | 49.87 |
| (SEQ ID NO: | | (SEQ ID NO: | | (SEQ ID NO: | |
| 60) | | 60) | | 68) | |
| DGTASYYDS | 32.34 | DGTGQVTGW | 20.35 | DGTGSTHGW | 43.08 |
| (SEQ ID NO: | | (SEQ ID NO: | | (SEQ ID NO: | |
| 61) | | 68) | | 119) | |
| AQWPTSYDA | 30.81 | DGTAIHLSS | 19.55 | DGTGSTQGW | 38.31 |
| (SEQ ID NO: | | (SEQ ID NO: | | (SEQ ID NO: | |
| 62) | | 67) | | 315) | |
| DGTADKPFR | 29.30 | DGTMDRPFK | 19.48 | DGTGTTTGW | 37.29 |
| (SEQ ID NO: | | (SEQ ID NO: | | (SEQ ID NO: | |
| 63) | | 102) | | 130) | |
| DGSSSYYDA | 28.05 | DGTGSTTGW | 19.20 | AQWAAGYNV | 34.57 |
| (SEQ ID NO: | | (SEQ ID NO: | | (SEQ ID NO: | |
| 64) | | 134) | | 245) | |
| DGTLSQPFR | 26.73 | DGSSSYYDA | 18.08 | DGTGGTKGW | 33.59 |
| (SEQ ID NO: | | (SEQ ID NO: | | (SEQ ID NO: | |
| 65) | | 64) | | 107) | |
| DGTAIHLSS | 26.23 | DGTSSYYDA | 17.93 | DGTGSTKGW | 29.64 |
| (SEQ ID NO: | | (SEQ ID NO: | | (SEQ ID NO: | |
| 67) | | 381) | | 313) | |
| AQFPTNYDS | 26.07 | DGSQSTTGW | 17.59 | DGSQSTTGW | 25.19 |
| (SEQ ID NO: | | (SEQ ID NO: | | (SEQ ID NO: | |
| 66) | | 136) | | 136) | |
| DGTMDKPFR | 25.05 | DGTGSTQGW | 17.24 | AQWEVKGGY | 23.44 |
| (SEQ ID NO: | | (SEQ ID NO: | | (SEQ ID NO: | |
| 70) | | 315) | | 247) | |
| DGTLAVPFK | 24.62 | DGTGTTTGW | 17.00 | DGTAIHLSS | 22.81 |
| (SEQ ID NO: | | (SEQ ID NO: | | (SEQ ID NO: | |
| 71) | | 130) | | 67) | |
| DGTGNVTGW | 24.05 | DGTLAVPFK | 16.84 | DGGGTTTGW | 22.62 |
| (SEQ ID NO: | | (SEQ ID NO: | | (SEQ ID NO: | |
| 69) | | 71) | | 270) | |
| DGTGQVTGW | 23.83 | DGTASYYDS | 16.68 | DGTGGLTGW | 22.42 |
| (SEQ ID NO: | | (SEQ ID NO: | | (SEQ ID NO: | |
| 68) | | 61) | | 294) | |
| DGTHIHLSS | 22.93 | DGTMDKPFR | 16.68 | DGTNTINGW | 20.76 |
| (SEQ ID NO: | | (SEQ ID NO: | | (SEQ ID NO: | |
| 162) | | 70) | | 124) | |
| DGTGNTHGW | 22.63 | DGTVANPFR | 16.32 | DGAGGTSGW | 19.55 |
| (SEQ ID NO: | | (SEQ ID NO: | | (SEQ ID NO: | |
| 72) | | 394) | | 151) | |
| DGTVIHLSS | 22.62 | DGTLNNPFR | 16.24 | DGTNTTHGW | 18.99 |
| (SEQ ID NO: | | (SEQ ID NO: | | (SEQ ID NO: | |
| 73) | | 109) | | 113) | |
| DGTLNNPFR | 22.33 | DGTLAAPFK | 15.96 | DGTGTVQGW | 18.84 |
| (SEQ ID NO: | | (SEQ ID NO: | | (SEQ ID NO: | |
| 109) | | 120) | | 327) | |
| DGTGNTSGW | 22.10 | DGTLSQPFR | 15.43 | DGTGQTIGW | 18.55 |
| (SEQ ID NO: | | (SEQ ID NO: | | (SEQ ID NO: | |
| 137) | | 65) | | 305) | |
| DGTGTTVGW | 21.72 | DGTHIHLSS | 15.11 | AQWELSNGY | 18.13 |
| (SEQ ID NO: | | (SEQ ID NO: | | (SEQ ID NO: | |
| 74) | | 162) | | 246) | |
| DGTSSYYDA | 20.94 | AQTTEKPWL | 15.00 | DGTGSLNGW | 17.93 |
| (SEQ ID NO: | | (SEQ ID NO: | | (SEQ ID NO: | |
| 381) | | 83) | | 309) | |
| DGAGTTSGW | 20.42 | DGTGNVTGW | 14.90 | DGTGTTLGW | 17.48 |
| (SEQ ID NO: | | (SEQ ID NO: | | (SEQ ID NO: | |
| 265) | | 69) | | 323) | |
| DGGGTTTGW | 20.27 | DGTGGVTGW | 14.89 | AQPEGSARW | 17.11 |
| (SEQ ID NO: | | (SEQ ID NO: | | (SEQ ID NO: | |
| 270) | | 299) | | 60) | |
| DGTLQQPFR | 19.88 | DGTSSYYDS | 14.80 | DGTGSTMGW | 16.91 |
| (SEQ ID NO: | | (SEQ ID NO: | | (SEQ ID NO: | |
| 89) | | 59) | | 314) | |
| DGTGQTIGW | 19.52 | DGTGNTSGW | 14.48 | DGTGNTHGW | 16.47 |
| (SEQ ID NO: | | (SEQ ID NO: | | (SEQ ID NO: | |
| 305) | | 137) | | 72) | |
| DGTVTTTGW | 19.49 | AQWPTAYDA | 14.48 | DGSGTTRGW | 15.83 |
| (SEQ ID NO: | | (SEQ ID NO: | | (SEQ ID NO: | |
| 405) | | 256) | | 114) | |
| DGTSIHLSS | 19.45 | AQGENPGRW | 14.41 | DGTNSTTGW | 15.48 |
| (SEQ ID NO: | | (SEQ ID NO: | | (SEQ ID NO: | |
| 378) | | 96) | | 143) | |
| DGTGSTTGW | 19.45 | DGTADKPFR | 14.32 | DGRNALTGW | 15.13 |
| (SEQ ID NO: | | (SEQ ID NO: | | (SEQ ID NO: | |
| 134) | | 63) | | 275) | |
| DGTGGVTGW | 19.44 | DGTGQTIGW | 14.27 | DGAAATTGW | 15.02 |
| (SEQ ID NO: | | (SEQ ID NO: | | (SEQ ID NO: | |
| 299) | | 305) | | 264) | |
| DGTVANPFR | 19.42 | DGTISQPFK | 13.84 | DGTATTMGW | 14.54 |
| (SEQ ID NO: | | (SEQ ID NO: | | (SEQ ID NO: | |
| 394) | | 105) | | 284) | |
| DGTGTTTGW | 19.16 | DGTKLMLSS | 13.71 | AQRYTGDSS | 14.35 |
| (SEQ ID NO: | | (SEQ ID NO: | | (SEQ ID NO: | |
| 130) | | 157) | | 138) | |
| DGAGGTSGW | 18.99 | AQTLAVPFK | 13.69 | DGAGTTSGW | 14.29 |
| (SEQ ID NO: | | (SEQ ID NO: | | (SEQ ID NO: | |
| 151) | | 168) | | 265) | |

GFAP PROMOTER

| C57BL/6 | | | BALB/C | | |
|---|---|---|---|---|---|
| REPLICATE 1 (N = 2) | | REPLICATE 2 (N = 6) | | REPLICATE 1 (N = 6) | |
| | Brain | | Brain | | Brain |
| | Enrichment | | Enrichment | | Enrichment |
| 9-mer peptide | Factor (fold | 9-mer peptide | Factor (fold | 9-mer peptide | Factor (fold |
| insert | over AAV9) | insert | over AAV9) | insert | over AAV9) |
| DGTADKPFR | 37.60 | DGTMDRPFK | 24.89 | DGTGSTTGW | 21.03 |
| (SEQ ID NO: | | (SEQ ID NO: | | (SEQ ID NO: | |
| 63) | | 102) | | 134) | |
| DGTLSQPFR | 35.97 | DGTAERPFR | 24.66 | DGTGQVTGW | 19.24 |
| (SEQ ID NO: | | (SEQ ID NO: | | (SEQ ID NO: | |
| 65) | | 140) | | 68) | |
| DGTTYVPPR | 33.09 | DGTADKPFR | 23.03 | DGTGTTTGW | 15.56 |
| (SEQ ID NO: | | (SEQ ID NO: | | (SEQ ID NO: | |
| 75) | | 63) | | 130) | |
| DGTNGLKGW | 32.14 | DGTLNNPFR | 22.91 | DGTGSTHGW | 14.45 |
| (SEQ ID NO: | | (SEQ ID NO: | | (SEQ ID NO: | |
| 76) | | 109) | | 119) | |
| AQGENPGRW | 31.99 | DGTLSQPFR | 21.60 | DGTAIHLSS | 11.74 |
| (SEQ ID NO: | | (SEQ ID NO: | | (SEQ ID NO: | |
| 96) | | 65) | | 67) | |
| AQGSWNPPA | 30.78 | DGTMDKPFR | 20.52 | DGTGSTQGW | 11.40 |
| (SEQ ID NO: | | (SEQ ID NO: | | (SEQ ID NO: | |
| 80) | | 70) | | 315) | |
| AQGTWNPPA | 29.19 | DGTISQPFK | 20.47 | DGTGGLTGW | 8.87 |
| (SEQ ID NO: | | (SEQ ID NO: | | (SEQ ID NO: | |
| 82) | | 105) | | 294) | |
| DGTISQPFK | 29.01 | AQGENPGRW | 20.09 | AQNGNPGRW | 8.82 |
| (SEQ ID NO: | | (SEQ ID NO: | | (SEQ ID NO: | |
| 105) | | 96) | | 84) | |
| DGTTFTPPR | 28.94 | AQTTEKPWL | 18.04 | DGTGGIKGW | 8.62 |
| (SEQ ID NO: | | (SEQ ID NO: | | (SEQ ID NO: | |
| 79) | | 83) | | 131) | |
| DGTRTTTGW | 28.59 | DGTVANPFR | 16.87 | DGRNALTGW | 8.39 |
| (SEQ ID NO: | | (SEQ ID NO: | | (SEQ ID NO: | |
| 106) | | 394) | | 275) | |
| DGTSYVPPR | 26.17 | DGTTYVPPR | 16.31 | DGTGSTKGW | 8.38 |
| (SEQ ID NO: | | (SEQ ID NO: | | (SEQ ID NO: | |
| 78) | | 75) | | 313) | |
| DGTIERPFR | 25.37 | AQTTDRPFL | 16.27 | AQRYTGDSS | 8.13 |
| (SEQ ID NO: | | (SEQ ID NO: | | (SEQ ID NO: | |
| 87) | | 85) | | 138) | |
| DGTMDRPFK | 24.85 | DGTTTYGAR | 15.62 | DGTGGTKGW | 8.06 |
| (SEQ ID NO: | | (SEQ ID NO: | | (SEQ ID NO: | |
| 102) | | 77) | | 107) | |
| DGTLAAPFK | 24.67 | DGTADRPFR | 15.60 | DGTATTTGW | 8.04 |
| (SEQ ID NO: | | (SEQ ID NO: | | (SEQ ID NO: | |
| 120) | | 155) | | 285) | |
| DGTLNNPFR | 24.62 | DGTIERPFR | 15.11 | DGTKMVLQL | 7.87 |
| (SEQ ID NO: | | (SEQ ID NO: | | (SEQ ID NO: | |
| 109) | | 87) | | 142) | |
| DGTSFTPPR | 24.14 | AQGSWNPPA | 15.11 | DGTGSLNGW | 7.71 |
| (SEQ ID NO: | | (SEQ ID NO: | | (SEQ ID NO: | |
| 88) | | 80) | | 309) | |
| AQTTDRPFL | 23.85 | AQGTWNPPA | 15.03 | DGTNTINGW | 7.59 |
| (SEQ ID NO: | | (SEQ ID NO: | | (SEQ ID NO: | |
| 85) | | 82) | | 124) | |
| DGTSFTPPK | 23.75 | DGSTERPFR | 15.01 | AQWELSNGY | 7.57 |
| (SEQ ID NO: | | (SEQ ID NO: | | (SEQ ID NO: | |
| 81) | | 99) | | 246) | |
| DGTHTRTGW | 23.54 | AQSVAKPFL | 14.90 | DGTNGLKGW | 7.50 |
| (SEQ ID NO: | | (SEQ ID NO: | | (SEQ ID NO: | |
| 90) | | 231) | | 76) | |
| DGTLQQPFR | 22.94 | DGTVDRPFK | 14.74 | DGTNTTHGW | 7.25 |
| (SEQ ID NO: | | (SEQ ID NO: | | (SEQ ID NO: | |
| 89) | | 395) | | 113) | |
| AQNGNPGRW | 22.80 | DGTTFTPPR | 14.56 | DGTRMVVQL | 7.25 |
| (SEQ ID NO: | | (SEQ ID NO: | | (SEQ ID NO: | |
| 84) | | 79) | | 370) | |
| DGTAERPFR | 21.65 | AQTLARPFV | 14.51 | DGTNSTTGW | 6.41 |
| (SEQ ID NO: | | (SEQ ID NO: | | (SEQ ID NO: | |
| 140) | | 98) | | 143) | |
| DGTGNTRGW | 21.12 | DGTGGTKGW | 14.13 | DGSQSTTGW | 6.29 |
| (SEQ ID NO: | | (SEQ ID NO: | | (SEQ ID NO: | |
| 94) | | 107) | | 136) | |
| AQTTEKPWL | 20.58 | AQGPTRPFL | 13.47 | AQPEGSARW | 6.23 |
| (SEQ ID NO: | | (SEQ ID NO: | | (SEQ ID NO: | |
| 83) | | 125) | | 60) | |
| DGTADRPFR | 20.49 | DGTRTTTGW | 13.39 | DGTGQTIGW | 6.16 |
| (SEQ ID NO: | | (SEQ ID NO: | | (SEQ ID NO: | |
| 155) | | 106) | | 305) | |
| DGTTWTPPR | 20.44 | AQNGNPGRW | 13.09 | DGTGGVTGW | 6.07 |
| (SEQ ID NO: | | (SEQ ID NO: | | (SEQ ID NO: | |
| 139) | | 84) | | 299) | |
| DGTTTYGAR | 20.43 | DGTVSNPFR | 12.77 | DGTVTTTGW | 6.04 |
| (SEQ ID NO: | | (SEQ ID NO: | | (SEQ ID NO: | |
| 77) | | 403) | | 405) | |
| DGTGGIKGW | 20.20 | AQGGNPGRW | 12.21 | DGKGSTQGW | 5.97 |
| (SEQ ID NO: | | (SEQ ID NO: | | (SEQ ID NO: | |
| 131) | | 91) | | 272) | |
| DGTLAVPFK | 19.43 | AQWPTSYDA | 11.93 | AQGENPGRW | 5.88 |
| (SEQ ID NO: | | (SEQ ID NO: | | (SEQ ID NO: | |
| 71) | | 62) | | 96) | |
| DGKQYQLSS | 18.74 | DGTLQQPFR | 11.92 | DGNGGLKGW | 5.82 |
| (SEQ ID NO: | | (SEQ ID NO: | | (SEQ ID NO: | |
| 92) | | 89) | | 167) | |
| DGSPEKPFR | 18.73 | DGTNGLKGW | 11.53 | DGTGTVHGW | 5.82 |
| (SEQ ID NO: | | (SEQ ID NO: | | (SEQ ID NO: | |
| 160) | | 76) | | 326) | |

[0375] The efficacy of the 333 capsid variants to transduce CNS was also compared for C57BL/6 mice BMVEC and Human BMVEC (FIG. 58A and FIG. 58B).

### Example 14. Engineering of a NGS-Driven Selection System for Full-Length Capsid Variants

[0376] A barcode system was engineered to allow enrichment studies with full capsid length modifications. While the TRACER platform described here was initially developed for the use of peptide display libraries, where the randomized peptide sequence itself can be used for Illumina NGS analysis due to its short size, the Illumina sequencing technology does not typically allow sequencing of more than 300 contiguous bases, and therefore our platform cannot be used for NGS analysis of full-length capsid variants, such as those generated by DNA shuffling technology or error-prone PCR.

[0377] An alternative RNA-driven platform for full-length capsid libraries in which a unique molecular identified (UMI) is placed outside the capsid gene and can be used for NGS enrichment analysis was designed (FIG. 59A-FIG. 59C). Once the variants with desired properties are identified by UMI enrichment analysis from animal tissue, the UMI sequence must allow highly specific recovery of the full-length capsid from the starting material with a minimal error rate. The system should have one or more of the following properties to be effective: 1) the UMI should be transcribed under control of a cell type-specific promoter, 2) the UMI should not interfere with capsid expression or splicing during virus production, 3) the UMI should be short enough for Illumina NGS sequencing (typically less than 60 nt for standard single-end 75 nt sequencing), and 4) the UMI should allow sequence-specific recovery of full-length capsids of interest from the starting DNA/virus library with a minimal error rate.

[0378] To address these properties: 1) the UMI was placed in the transcribed region of capsid library (i.e., anywhere between the transcription start site and the polyadenylation signal), 2) the UMI was placed either in various locations of the AAV intron (which mostly unspliced in the absence of helper functions) or between the capsid stop codon and the polyadenylation signal, 3) the UMI cassette was composed of two randomized 21-nt sequences separated by a 15-nt spacer, for a total length of 57 nt, which allows 18 extra nucleotides for primer annealing, and 4) the UMI randomized sequences were formed of NSW triplets (N=A, T, G, C; S=G, C; W=A, T) to prevent large variations in annealing temperature with amplification primers, avoid homopolymeric stretches and prevent the formation of a premature polyA signal (AATAAA).

[0379] Importantly, the UMI cassette contained two random sequences in tandem. The first sequence (outermost) is used to design a matching capsid recovery primer, and the second sequence (innermost) to confirm the identity of the capsid amplicon after cloning. This method should allow to eliminate all clones containing non-specific amplification products. In an alternative embodiment, the innermost sequence can also be used to design a nested PCR primer in order to increase the specificity of amplification (FIG. 59A-FIG. 59C).

[0380] Several insertion sites of the tandem barcode to test the impact on virus viability and titers were explored. A series of constructs were engineered with the barcode inserted in the AAV intron of the CAG9 plasmid (FIG. 60A). Since AAV intron is spliced during virus production, the presence of the barcode should have only a minimal impact on the yields. Conversely, the AAV splicing is very ineffective in the absence of helper functions (Mouw et al., 2000), therefore the barcode sequence will be preserved in the RNA recovered from animal tissue. All intronic barcode constructs were tested for their ability to produce high titer AAV progeny by cotransfecting them with pHelper and pREP3stop plasmids. All constructs allowed high titer AAV production going from 50% to 80% of non-barcoded CAG9 virus (FIG. 60B).

[0381] RNA splicing analysis from transfected cells showed that the rate of AAV intron splicing was slightly different between constructs and was more efficient when the intronic barcode was inserted after a conserved intervening sequence downstream of the splice donor (FIG. 58C, upper panel).

[0382] Globin intron splicing was 100% effective in all tested conditions (FIG. 60C, lower panel). As expected, AAV intron splicing was almost undetectable in the absence of helper functions.

[0383] An alternative platform was tested where the tandem barcode was placed between the capsid stop codon and the polyadenylation signal (FIG. 59B). Titers produced by the 3′-barcoded constructs were identical to the non-barcoded CAG9 construct.

[0384] Overall, external barcoding of full-length capsid allows highly efficient AAV production, and the novel tandem barcode platform allows NGS-driven sequence-specific recovery from library preparations with high confidence.

TABLE 12
Sequences

| DESCRIPTION | |
|---|---|
| SEQ ID NO: | NUCLEIC ACID SEQUENCE |
| PREP2 SEQ ID | CGCAGGGTCTCCATTTTGAAGCGGGAGGTTTGAACGCGCAGCCGCCATGCCGGGGTTTTA |
| NO: 4 | CGAGATTGTGATTAAGGTCCCCAGCGACCTTGACGAGCATCTGCCCGGCATTTCTGACAG |
| | CTTTGTGAACTGGGTGGCCGAGAAGGAATGGGAGTTGCCGCCAGATTCTGACATGGATCT |
| | GAATCTGATTGAGCAGGCACCCCTGACCGTGGCCGAGAAGCTGCAGCGCGACTTTCTGAC |
| | GGAATGGCGCCGTGTGAGTAAGGCCCCGGAGGCTCTTTTCTTTGTGCAATTTGAGAAGGG |
| | AGAGAGCTACTTCCACATGCACGTGCTCGTGGAAACCACCGGGGTGAAATCCATGGTTTT |
| | GGGACGTTTCCTGAGTCAGATTCGCGAAAAACTGATTCAGAGAATTTACCGCGGGATCGA |
| | GCCGACTTTGCCAAACTGGTTCGCGGTCACAAAGACCAGAAATGGCGCCGGAGGCGGGA |
| | ACAAGGTGGTGGATGAGTGCTACATCCCCAATTACTTGCTCCCCAAAACCCAGCCTGAGC |
| | TCCAGTGGGCGTGGACTAATATGGAACAGTATTTAAGCGCCTGTTTGAATCTCACGGAGC |
| | GTAAACGGTTGGTGGCGCAGCATCTGACGCACGTGTCGCAGACGCAGGAGCAGAACAAA |
| | GAGAATCAGAATCCCAATTCTGATGCGCCGGTGATCAGATCAAAAACTTCAGCCAGGTAC |
| | ATGGAGCTGGTCGGGTGGCTCGTGGACAAGGGGATTACCTCGGAGAAGCAGTGGATCCA |
| | GGAGGACCAGGCCTCATACATCTCCTTCAATGCGGCCTCCAACTCGCGGTCCCAAATCAA |
| | GGCTGCCTTGGACAATGCGGGAAAGATTATGAGCCTGACTAAAACCGCCCCCGACTACCT |
| | GGTGGGCCAGCAGCCCGTGGAGGACATTTCCAGCAATCGGATTTATAAAATTTTGGAACT |
| | AAACGGGTACGATCCCCAATATGCGGCTTCCGTCTTTCTGGGATGGGCCACGAAAAAGTT |
| | CGGCAAGAGGAACACCATCTGGCTGTTTGGGCCTGCAACTACCGGGAAGACCAACATCG |
| | CGGAGGCCATAGCCCACACTGTGCCCTTCTACGGGTGCGTAAACTGGACCAATGAGAACT |
| | TTCCCTTCAACGACTGTGTCGACAAGATGGTGATCTGGTGGGAGGAGGGGAAGATGACC |
| | GCCAAGGTCGTGGAGTCGGCCAAAGCCATTCTCGGAGGAAGCAAGGTGCGCGTGGACCA |
| | GAAATGCAAGTCCTCGGCCCAGATAGACCCGACTCCCGTGATCGTCACCTCCAACACCAA |
| | CATGTGCGCCGTGATTGACGGGAACTCAACGACCTTCGAACACCAGCAGCCGTTGCAAGA |
| | CCGGATGTTCAAATTTGAACTCACCCGCCGTCTGGATCATGACTTTGGGAAGGTCACCAA |
| | GCAGGAAGTCAAAGACTTTTTCCGGTGGGCAAAGGATCACGTGGTTGAGGTGGAGCATG |
| | AATTCTACGTCAAAAAGGGTGGAGCCAAGAAAAGACCCGCCCCCAGTGACGCAGATATA |
| | AGTGAGCCCAAACGGGTGCGCGAGTCAGTTGCGCAGCCATCGACGTCAGACGCGGAAGC |
| | TTCGATCAACTACGCAGACAGGTACCAAAACAAATGTTCTCGTCACGTGGGCATGAATCT |
| | GATGCTGTTTCCCTGCAGACAATGCGAGAGAATGAATCAGAATTCAAATATCTGCTTCAC |
| | TCACGGACAGAAAGACTGTTTAGAGTGCTTTCCCGTGTCAGAATCTCAACCCGTTTCTGTC |
| | GTCAAAAAGGCGTATCAGAAACTGTGCTACATTCATCATATCATGGGAAAGGTGCCAGAC |
| | GCTTGCACTGCCTGCGATCTGGTCAATGTGGATTTGGATGACTGCATCTTTGAACAATAA |
| | ATGATTTAAATCAGGTATGGCTGCCGATGGTTATCTTCCAGATTGGCTCGAGGACACTCTC |
| | TCTGAAGGAATAAGACAGTGGTGGAAGCTCAAACCTGGCCCACCACCACCAAAGCCCGC |
| | AGAGCGGCATAAGGACGACAGCAGGGGTCTTGTGCTTCCTGGGTACAAGTACCTCGGAC |
| | CCTTCAACGGACTCGACAAGGGAGAGCCGGTCAACGAGGCAGACGCCGCGGCCCTCGAG |
| | CACGACAAAGCCTACGACCGGCAGCTCGACAGCGGAGACAACCCGTACCTCAAGTACAA |
| | CCACGCCGACGCGGAGTTTCAGGAGCGCCTTAAAGAAGATACGTCTTTTGGGGGCAACCT |
| | CGGACGAGCAGTCTTCCAGGCGAAAAAGAGGGTTCTTGAACCTCTGGGCCTGGTCCACCA |
| | TACCTTCGATTATCCGATTTGCTTGTTAATCAATAAACCGTTTAATTCGTTTCAGTTGAACT |
| | TTGGTCTCTGCGTATTTCTTTCTTATCTAGTTTCCATGCTCTAGAGCGGCCGCCACCGCGGT |
| | GGAGCTCCAGCTTTTGT |
| CMV9-BSTEII | TTGGCCACTCCCTCTCTGCGCGCTCGCTCGCTCACTGAGGCCGGGCGACCAAAGGTCGCC |
| SEQ ID NO: 5 | CGACGCCCGGGCTTTGCCCGGGCGGCCTCAGTGAGCGAGCGAGCGCGCAGAGAGGGAGT |
| | GGCCAACTCCATCACTAGGGGTTCCTGGAGGGGTGGAGTCGTGACGATATCGTTTAAACC |
| | GCGTCGTTACATAACTTACGGTAAATGGCCCGCCTGGCTGACCGCCCAACGACCCCCGCC |
| | CATTGACGTCAATAATGACGTATGTTCCCATAGTAACGCCAATAGGGACTTTCCATTGAC |
| | GTCAATGGGTGGAGTATTTACGGTAAACTGCCCACTTGGCAGTACATCAAGTGTATCATA |
| | TGCCAAGTACGCCCCCTATTGACGTCAATGACGGTAAATGGCCCGCCTGGCATTATGCCC |
| | AGTACATGACCTTATGGGACTTTCCTACTTGGCAGTACATCTACGTATTAGTCATCGCTAT |
| | TACCATGGTGATGCGGTTTTGGCAGTACATCAATGGGCGTGGATAGCGGTTTGACTCACG |
| | GGGATTTCCAAGTCTCCACCCCATTGACGTCAATGGGAGTTTGTTTTGGCACCAAAATCA |
| | ACGGGACTTTCCAAAATGTCGTAACAACTCCGCCCCATTGACGCAAATGGGCGGTAGGCG |
| | TGTACGGTGGGAGGTCTATATAAGCAGAGCTCGGGAGCGGTCACCAAGCAGGAAGTCAA |
| | AGACTTTTTCCGGTGGGCAAAGGATCACGTGGTTGAGGTGGAGCATGAATTCTACGTCAA |
| | AAAGGGTGGAGCCAAGAAAAGACCCGCCCCCAGTGACGCAGATATAAGTGAGCCCAAAC |
| | GGGTGCGCGAGTCAGTTGCGCAGCCATCGACGTCAGACGCGGAAGCTTCGATCAACTAC |
| | GCGGACAGGTACCAAAACAAATGTTCTCGTCACGTGGGCATGAATCTGATGCTGTTTCCC |
| | TGCAGACAATGCGAGAGACTGAATCAGAATTCAAATATCTGCTTCACTCACGGTGTCAAA |
| | GACTGTTTAGAGTGCTTTCCCGTGTCAGAATCTCAACCCGTTTCTGTCGTCAAAAAGGCGT |
| | ATCAGAAACTGTGCTACATTCATCACATCATGGGAAAGGTGCCAGACGCTTGCACTGCTT |
| | GCGACCTGGTCAATGTGGACTTGGATGACTGTGTTTCTGAACAATAAATGACTTAAACCA |
| | GGTATGGCTGCCGATGGTTATCTTCCAGATTGGCTCGAGGACAACCTTAGTGAAGGAATT |
| | CGCGAGTGGTGGGCTTTGAAACCTGGAGCCCCTCAACCCAAGGCAAATCAACAACATCA |
| | AGACAACGCTCGAGGTCTTGTGCTTCCGGGTTACAAATACCTTGGACCCGGCAACGGACT |
| | CGACAAGGGGGAGCCGGTCAACGCAGCAGACGCGGCGGCCCTCGAGCACGACAAGGCCT |
| | ACGACCAGCAGCTCAAGGCCGGAGACAACCCGTACCTCAAGTACAACCACGCCGACGCC |
| | GAGTTCCAGGAGCGGCTCAAAGAAGATACGTCTTTTGGGGGCAACCTCGGGCGAGCAGT |
| | CTTCCAGGCCAAAAAGAGGCTTCTTGAACCTCTTGGTCTGGTTGAGGAAGCGGCTAAGAC |
| | GGCTCCTGGAAAGAAGAGGCCTGTAGAGCAGTCTCCTCAGGAACCGGACTCCTCCGCGG |
| | GTATTGGCAAATCGGGTGCACAGCCCGCTAAAAAGAGACTCAATTTCGGTCAGACTGGCG |
| | ACACAGAGTCAGTCCCAGACCCTCAACCAATCGGAGAACCTCCCGCAGCCCCCTCAGGTG |
| | TGGGATCTCTTACAATGGCTTCAGGTGGTGGCGCACCAGTGGCAGACAATAACGAAGGTG |
| | CCGATGGAGTGGGTAGTTCCTCGGGAAATTGGCATTGCGATTCCCAATGGCTGGGGGACA |
| | GAGTCATCACCACCAGCACCCGAACCTGGGCCCTGCCCACCTACAACAATCACCTCTACA |
| | AGCAAATCTCCAACAGCACATCTGGAGGATCTTCAAATGACAACGCCTACTTCGGCTACA |
| | GCACCCCCTGGGGGTATTTTGACTTCAACAGATTCCACTGCCACTTCTCACCACGTGACTG |
| | GCAGCGACTCATCAACAACAACTGGGGATTCCGGCCTAAGCGACTCAACTTCAAGCTCTT |
| | CAACATTCAGGTCAAAGAGGTTACGGACAACAATGGAGTCAAGACCATCGCCAATAACC |
| | TTACCAGCACGGTCCAGGTCTTCACGGACTCAGACTATCAGCTCCCGTACGTGCTCGGGT |
| | CGGCTCACGAGGGCTGCCTCCCGCCGTTCCCAGCGGACGTTTTCATGATTCCTCAGTACG |
| | GGTATCTGACGCTTAATGATGGAAGCCAGGCCGTGGGTCGTTCGTCCTTTTACTGCCTGG |
| | AATATTTCCCGTCGCAAATGCTAAGAACGGGTAACAACTTCCAGTTCAGCTACGAGTTTG |
| | AGAACGTACCTTTCCATAGCAGCTACGCTCACAGCCAAAGCCTGGACCGACTAATGAATC |
| | CACTCATCGACCAATACTTGTACTATCTCTCAAAGACTATTAACGGTTCTGGACAGAATC |
| | AACAAACGCTAAAATTCAGTGTGGCCGGACCCAGCAACATGGCTGTCCAGGGAAGAAAC |
| | TACATACCTGGACCCAGCTACCGACAACAACGTGTCTCAACCACTGTGACTCAAAACAAC |
| | AACAGCGAATTTGCTTGGCCTGGAGCTTCTTCTTGGGCTCTCAATGGACGTAATAGCTTGA |
| | TGAATCCTGGACCTGCTATGGCCAGCCACAAAGAAGGAGAGGACCGTTTCTTTCCTTTGT |
| | CTGGATCTTTAATTTTTGGCAAACAAGGAACTGGAAGAGACAACGTGGATGCGGACAAA |
| | GTCATGATAACCAACGAAGAAGAAATTAAAACTACTAACCCGGTAGCAACGGAGTCCTA |
| | TGGACAAGTGGCCACAAACCACCAGAGTGCCCAAGCACAGGCGCAGACCGGCTGGGTTC |
| | AAAACCAAGGAATACTTCCGGGTATGGTTTGGCAGGACAGAGATGTGTACCTGCAAGGA |
| | CCCATTTGGGCCAAAATTCCTCACACGGACGGCAACTTTCACCCTTCTCCGCTGATGGGA |
| | GGGTTTGGAATGAAGCACCCGCCTCCTCAGATCCTCATCAAAAACACACCTGTACCTGCG |
| | GATCCTCCAACGGCCTTCAACAAGGACAAGCTGAACTCTTTCATCACCCAGTATTCTACT |
| | GGCCAAGTCAGCGTGGAGATCGAGTGGGAGCTGCAGAAGGAAAACAGCAAGCGCTGGA |
| | ACCCGGAGATCCAGTACACTTCCAACTATTACAAGTCTAATAATGTTGAATTTGCTGTTAA |
| | TACTGAAGGTGTATATAGTGAACCCCGCCCCATTGGCACCAGATACCTGACTCGTAATCT |
| | GTAATCGATTGTTAATCAATAAACCGTTTAATTCGTTTCAGTTGAACTTTGGTCTCTGCGT |
| | ATTTCTTTCTTATCTAGTTTCCATGGCTACGTAGATAAGTAGCATGGCGGGTTAATCATTA |
| | ACTACAAGGAACCCCTAGTGATGGAGTTGGCCACTCCCTCTCTGCGCGCTCGCTCGCTCA |
| | CTGAGGCCGGGCGACCAAAGGTCGCCCGACGCCCGGGCTTTGCCCGGGCGGCCTCAGTG |
| | AGCGAGCGAGCGCGCAGAGAGGGAGTGGCCAA |
| PREP-AAP | GTCGACGGTATCGGGGGAGCTCGCAGGGTCTCCATTTTGAAGCGGGAGGTTTGAACGCGCAGC |
| SEQ ID NO: 6 | CGCCATGCCGGGGTTTTACGAGATTGTGATTAAGGTCCCCAGCGACCTTGACGAGCATCTGCCC |
| | GGCATTTCTGACAGCTTTGTGAACTGGGTGGCCGAGAAGGAATGGGAGTTGCCGCCAGATTCT |
| | GACATGGATCTGAATCTGATTGAGCAGGCACCCCTGACCGTGGCCGAGAAGCTGCAGCGCGAC |
| | TTTCTGACGGAATGGCGCCGTGTGAGTAAGGCCCCGGAGGCTCTTTTCTTTGTGCAATTTGAGA |
| | AGGGAGAGAGCTACTTCCACATGCACGTGCTCGTGGAAACCACCGGGGTGAAATCCATGGTTT |
| | TGGGACGTTTCCTGAGTCAGATTCGCGAAAAACTGATTCAGAGAATTTACCGCGGGATCGAGC |
| | CGACTTTGCCAAACTGGTTCGCGGTCACAAAGACCAGAAATGGCGCCGGAGGCGGGAACAAG |
| | GTGGTGGATGAGTGCTACATCCCCAATTACTTGCTCCCCAAAACCCAGCCTGAGCTCCAGTGGG |
| | CGTGGACTAATATGGAACAGTATTTAAGCGCCTGTTTGAATCTCACGGAGCGTAAACGGTTGGT |
| | GGCGCAGCATCTGACGCACGTGTCGCAGACGCAGGAGCAGAACAAAGAGAATCAGAATCCCA |
| | ATTCTGATGCGCCGGTGATCAGATCAAAAACTTCAGCCAGGTACATGGAGCTGGTCGGGTGGC |
| | TCGTGGACAAGGGGATTACCTCGGAGAAGCAGTGGATCCAGGAGGACCAGGCCTCATACATCT |
| | CCTTCAATGCGGCCTCCAACTCGCGGTCCCAAATCAAGGCTGCCTTGGACAATGCGGGAAAGA |
| | TTATGAGCCTGACTAAAACCGCCCCCGACTACCTGGTGGGCCAGCAGCCCGTGGAGGACATTT |
| | CCAGCAATCGGATTTATAAAATTTTGGAACTAAACGGGTACGATCCCCAATATGCGGCTTCCGT |
| | CTTTCTGGGATGGGCCACGAAAAAGTTCGGCAAGAGGAACACCATCTGGCTGTTTGGGCCTGC |
| | AACTACCGGGAAGACCAACATCGCGGAGGCCATAGCCCACACTGTGCCCTTCTACGGGTGCGT |
| | AAACTGGACCAATGAGAACTTTCCCTTCAACGACTGTGTCGACAAGATGGTGATCTGGTGGGA |
| | GGAGGGGAAGATGACCGCCAAGGTCGTGGAGTCGGCCAAAGCCATTCTCGGAGGAAGCAAGG |
| | TGCGCGTGGACCAGAAATGCAAGTCCTCGGCCCAGATAGACCCGACTCCCGTGATCGTCACCT |
| | CCAACACCAACATGTGCGCCGTGATTGACGGGAACTCAACGACCTTCGAACACCAGCAGCCGT |
| | TGCAAGACCGGATGTTCAAATTTGAACTCACCCGCCGTCTGGATCATGACTTTGGGAAGGTCAC |
| | CAAGCAGGAAGTCAAAGACTTTTTCCGGTGGGCAAAGGATCACGTGGTTGAGGTGGAGCATGA |
| | ATTCTACGTCAAAAAGGGTGGAGCCAAGAAAAGACCCGCCCCCAGTGACGCAGATATAAGTGA |
| | GCCCAAACGGGTGCGCGAGTCAGTTGCGCAGCCATCGACGTCAGACGCGGAAGCTTCGATCAA |
| | CTACGCGGACAGGTACCAAAACAAATGTTCTCGTCACGTGGGCATGAATCTGATGCTGTTTCCC |
| | TGCAGACAATGCGAGAGACTGAATCAGAATTCAAATATCTGCTTCACTCACGGTGTCAAAGAC |
| | TGTTTAGAGTGCTTTCCCGTGTCAGAATCTCAACCCGTTTCTGTCGTCAAAAAGGCGTATCAGA |
| | AACTGTGCTACATTCATCACATCATGGGAAAGGTGCCAGACGCTTGCACTGCTTGCGACCTGGT |
| | CAATGTGGACTTGGATGACTGTGTTTCTGAACAATAAATGACTTAAACCAGGTATGGCTGCCGA |
| | TGGTTATCTTCCAGATTGGCTCGAGGACAACCTTAGTGAAGGAATTCGCGAGTGGTGGGCTTTG |
| | AAACCTGGAGCCCCTCAACCCAAGGCAAATCAACAACATCAAGACAACGCTCGAGGTCTTGTG |
| | CTTCCGGGTTACAAATACCTTGGACCCGGCAACGGACTCGACAAGGGGGAGCCGGTCAACGCA |
| | GCAGACGCGGCGGCCCTCGAGCACGACAAGGCCTACGACCAGCAGCTCAAGGCCGGAGACAA |
| | CCCGTACCTCAAGTACAACCACGCCGACGCCGAGTTCCAGGAGCGGCTCAAAGAAGATACGTC |
| | TTTTGGGGGCAACCTCGGGCGAGCAGTCTTCCAGGCCAAAAAGAGGCTTCTTGAACCTCTTGGT |
| | CTGGTTGAGGAAGCGGCTAAGACGGCTCCTGGAAAGAAGAGGCCTGTAGAGCAGTCTCCTCAG |
| | GAACCGGACTCCTCCGCGGGTATTGGCAAATCGGGTGCACAGCCCGCTAAAAAGAGACTCAAT |
| | TTCGGTCAGACTGGCGACACAGAGTCAGTCCCAGACCCTCAACCAATCGGAGAACCTCCCGCA |
| | GCCCCCTCAGGTGTGGGATCTCTTACAATGGCTTCAGGTGGTGGCGCACCAGTGGCAGACAAT |
| | AACGAAGGTGCCGATGGAGTGGGTAGTTCCTCGGGAAATTGGCATTGCGATTCCCAATGGCTG |
| | GGGGACAGAGTCATCACCACCAGCACCCGAACCTGGGCCCTGCCCACCTACAACAATCACCTC |
| | TACAAGCAAATCTCCAACAGCACATCTGGAGGATCTTCAAATGACAACGCCTACTTCGGCTAC |
| | AGCACCCCCTGGGGGTATTTTGACTTCAACAGATTCCACTGCCACTTCTCACCACGTGACTGGC |
| | AGCGACTCATCAACAACAACTGGGGATTCCGGCCTAAGCGACTCAACTTCAAGCTCTTCAACAT |
| | TCAGGTCAAAGAGGTTACGGACAACAATGGAGTCAAGACCATCGCCAATAACCTTACCAGCAC |
| | GGTCCAGGTCTTCACGGACTCAGACTATCAGCTCCCGTACGTGCTCGGGTCGGCTCACGAGGGC |
| | TGCCTCCCGCCGTTCCCAGCGGACGTTTTCATGATTCCTCAGTACGGGTATCTGACGCTTAATG |
| | ATGGAAGCCAGGCCGTGGGTCGTTCGTCCTTTTACTGCCTGGAATATTTCCCGTCGCAAATGCT |
| | AAGAACGGGTAACAACTTCCAGTTCAGCTACGAGTTTGAGAACGTACCTTTCCATAGCAGCTAC |
| | GCTCACAGCCAAAGCCTGGACCGACTAATGAATCCACTCATCGACCAATACTTGTACTATCTCT |
| | CAAAGACTATTAACGGTTCTGGACAGAATCAACAAACGCTAAAATTCAGTGTGGCCGGACCCA |
| | GCAACATGGCTGTCCAGGGAAGAAACTACATACCTGGACCCAGCTACCGACAACAACGTGTCT |
| | CAACCACTGTGACTCAAAACAACAACAGCGAATTTGCTTGGCCTGGAGCTTCTTCTTGGGCTCT |
| | CAATGGACGTAATAGCTTGATGAATCCTGGACCTGCTATGGCCAAGTCAGCGTGGAGATCGAG |
| | TGGGAGCTGCAGAAGGAAAACAGCAAGCGCTGGAACCCGGAGATCCAGTACACTTCCAACTAT |
| | TACAAGTCTAATAATGTTGAATTTGCTGTTAATACTGAAGGTGTATATAGTGAACCCCGCCCCA |
| | TTGGCACCAGATACCTGACTCGTAATCTGTAATTGCTTGTTAATCAATAAACCGTTTAATTCGTT |
| | TCAGTTGAACTTTGGTCTC |
| PREP3STOP | GTCGACGGTATCGGGGGAGCTCGCAGGGTCTCCATTTTGAAGCGGGAGGTTTGAACGCGCAGC |
| SEQ ID NO: 7 | CGCCATGCCGGGGTTTTACGAGATTGTGATTAAGGTCCCCAGCGACCTTGACGAGCATCTGCCC |
| | GGCATTTCTGACAGCTTTGTGAACTGGGTGGCCGAGAAGGAATGGGAGTTGCCGCCAGATTCT |
| | GACATGGATCTGAATCTGATTGAGCAGGCACCCCTGACCGTGGCCGAGAAGCTGCAGCGCGAC |
| | TTTCTGACGGAATGGCGCCGTGTGAGTAAGGCCCCGGAGGCTCTTTTCTTTGTGCAATTTGAGA |
| | AGGGAGAGAGCTACTTCCACATGCACGTGCTCGTGGAAACCACCGGGGTGAAATCCATGGTTT |
| | TGGGACGTTTCCTGAGTCAGATTCGCGAAAAACTGATTCAGAGAATTTACCGCGGGATCGAGC |
| | CGACTTTGCCAAACTGGTTCGCGGTCACAAAGACCAGAAATGGCGCCGGAGGCGGGAACAAG |
| | GTGGTGGATGAGTGCTACATCCCCAATTACTTGCTCCCCAAAACCCAGCCTGAGCTCCAGTGGG |
| | CGTGGACTAATATGGAACAGTATTTAAGCGCCTGTTTGAATCTCACGGAGCGTAAACGGTTGGT |
| | GGCGCAGCATCTGACGCACGTGTCGCAGACGCAGGAGCAGAACAAAGAGAATCAGAATCCCA |
| | ATTCTGATGCGCCGGTGATCAGATCAAAAACTTCAGCCAGGTACATGGAGCTGGTCGGGTGGC |
| | TCGTGGACAAGGGGATTACCTCGGAGAAGCAGTGGATCCAGGAGGACCAGGCCTCATACATCT |
| | CCTTCAATGCGGCCTCCAACTCGCGGTCCCAAATCAAGGCTGCCTTGGACAATGCGGGAAAGA |
| | TTATGAGCCTGACTAAAACCGCCCCCGACTACCTGGTGGGCCAGCAGCCCGTGGAGGACATTT |
| | CCAGCAATCGGATTTATAAAATTTTGGAACTAAACGGGTACGATCCCCAATATGCGGCTTCCGT |
| | CTTTCTGGGATGGGCCACGAAAAAGTTCGGCAAGAGGAACACCATCTGGCTGTTTGGGCCTGC |
| | AACTACCGGGAAGACCAACATCGCGGAGGCCATAGCCCACACTGTGCCCTTCTACGGGTGCGT |
| | AAACTGGACCAATGAGAACTTTCCCTTCAACGACTGTGTCGACAAGATGGTGATCTGGTGGGA |
| | GGAGGGGAAGATGACCGCCAAGGTCGTGGAGTCGGCCAAAGCCATTCTCGGAGGAAGCAAGG |
| | TGCGCGTGGACCAGAAATGCAAGTCCTCGGCCCAGATAGACCCGACTCCCGTGATCGTCACCT |
| | CCAACACCAACATGTGCGCCGTGATTGACGGGAACTCAACGACCTTCGAACACCAGCAGCCGT |
| | TGCAAGACCGGATGTTCAAATTTGAACTCACCCGCCGTCTGGATCATGACTTTGGGAAGGTCAC |
| | CAAGCAGGAAGTCAAAGACTTTTTCCGGTGGGCAAAGGATCACGTGGTTGAGGTGGAGCATGA |
| | ATTCTACGTCAAAAAGGGTGGAGCCAAGAAAAGACCCGCCCCCAGTGACGCAGATATAAGTGA |
| | GCCCAAACGGGTGCGCGAGTCAGTTGCGCAGCCATCGACGTCAGACGCGGAAGCTTCGATCAA |
| | CTACGCGGACAGGTACCAAAACAAATGTTCTCGTCACGTGGGCATGAATCTGATGCTGTTTCCC |
| | TGCAGACAATGCGAGAGACTGAATCAGAATTCAAATATCTGCTTCACTCACGGTGTCAAAGAC |
| | TGTTTAGAGTGCTTTCCCGTGTCAGAATCTCAACCCGTTTCTGTCGTCAAAAAGGCGTATCAGA |
| | AACTGTGCTACATTCATCACATCATGGGAAAGGTGCCAGACGCTTGCACTGCTTGCGACCTGGT |
| | CAATGTGGACTTGGATGACTGTGTTTCTGAACAATAAATGACTTAAACCAGGTATGGCTGCCGA |
| | TGGTTAGCTTCCAGATTGGCTCGAGGACAACCTTAGTGAAGGAATTCGCGAGTGGTGGGCTTTG |
| | AAACCTGGAGCCCCTCAACCCAAGGCAAATCAACAACATCAAGACAACGCTCGAGGTCTTGTG |
| | CTTCCGGGTTACAAATACCTTGGACCCGGCAACGGACTCGACAAGGGGGAGCCGGTCAACGCA |
| | GCAGACGCGGCGGCCCTCGAGCACGACAAGGCCTACGACCAGCAGCTCAAGGCCGGAGACAA |
| | CCCGTACCTCAAGTACAACCACGCCGACGCCGAGTTCCAGGAGCGGCTCAAAGAAGATACGTC |
| | TTTTGGGGGCAACCTCGGGCGAGCAGTCTTCCAGGCCAAAAAGAGGCTTCTTGAACCTCTTGGT |
| | CTGGTTGAGGAAGCGGCTAAGACGGCTCCTGGAAAGTAGAGGCCTGTAGAGCAGTCTCCTCAG |
| | GAACCGGACTCCTCCGCGGGTATTGGCAAATCGGGTGCACAGCCCGCTAAAAAGAGACTCAAT |
| | TTCGGTCAGACTGGCGACACAGAGTCAGTCCCAGACCCTCAACCAATCGGAGAACCTCCCGCA |
| | GCCCCCTCAGGTGTGGGATCTCTTACAATGGCTTCAGGTGGTGGCGCACCAGTGGCAGACAAT |
| | AACTAAGGTGCCGATGGAGTGGGTAGTTCCTCGGGAAATTGGCATTGCGATTCCCAATGGCTG |
| | GGGGACAGAGTCATCACCACCAGCACCCGAACCTGGGCCCTGCCCACCTACAACAATCACCTC |
| | TACAAGCAAATCTCCAACAGCACATCTGGAGGATCTTCAAATGACAACGCCTACTTCGGCTAC |
| | AGCACCCCCTGGGGGTATTTTGACTTCAACAGATTCCACTGCCACTTCTCACCACGTGACTGGC |
| | AGCGACTCATCAACAACAACTGGGGATTCCGGCCTAAGCGACTCAACTTCAAGCTCTTCAACAT |
| | TCAGGTCAAAGAGGTTACGGACAACAATGGAGTCAAGACCATCGCCAATAACCTTACCAGCAC |
| | GGTCCAGGTCTTCACGGACTCAGACTATCAGCTCCCGTACGTGCTCGGGTCGGCTCACGAGGGC |
| | TGCCTCCCGCCGTTCCCAGCGGACGTTTTCATGATTCCTCAGTACGGGTATCTGACGCTTAATG |
| | ATGGAAGCCAGGCCGTGGGTCGTTCGTCCTTTTACTGCCTGGAATATTTCCCGTCGCAAATGCT |
| | AAGAACGGGTAACAACTTCCAGTTCAGCTACGAGTTTGAGAACGTACCTTTCCATAGCAGCTAC |
| | GCTCACAGCCAAAGCCTGGACCGACTAATGAATCCACTCATCGACCAATACTTGTACTATCTCT |
| | CAAAGACTATTAACGGTTCTGGACAGAATCAACAAACGCTAAAATTCAGTGTGGCCGGACCCA |
| | GCAACATGGCTGTCCAGGGAAGAAACTACATACCTGGACCCAGCTACCGACAACAACGTGTCT |
| | CAACCACTGTGACTCAAAACAACAACAGCGAATTTGCTTGGCCTGGAGCTTCTTCTTGGGCTCT |
| | CAATGGACGTAATAGCTTGATGAATCCTGGACCTGCTATGGCCAAGTCAGCGTGGAGATCGAG |
| | TGGGAGCTGCAGAAGGAAAACAGCAAGCGCTGGAACCCGGAGATCCAGTACACTTCCAACTAT |
| | TACAAGTCTAATAATGTTGAATTTGCTGTTAATACTGAAGGTGTATATAGTGAACCCCGCCCCA |
| | TTGGCACCAGATACCTGACTCGTAATCTGTAATTGCTTGTTAATCAATAAACCGTTTAATTCGTT |
| | TCAGTTGAACTTTGGTCTC |
| SYN-CAP9 | TTGGCCACTCCCTCTCTGCGCGCTCGCTCGCTCACTGAGGCCGGGCGACCAAAGGTCGCCCGAC |
| SEQ ID NO: 8 | GCCCGGGCTTTGCCCGGGCGGCCTCAGTGAGCGAGCGAGCGCGCAGAGAGGGAGTGGCCAACT |
| | CCATCACTAGGGGTTCCTGGAGGGGTGGAGTCGTGACGATATCTAGTATCTGCAGAGGGCCCT |
| | GCGTATGAGTGCAAGTGGGTTTTAGGACCAGGATGAGGCGGGGTGGGGGTGCCTACCTGACGA |
| | CCGACCCCGACCCACTGGACAAGCACCCAACCCCCATTCCCCAAATTGCGCATCCCCTATCAGA |
| | GAGGGGGAGGGGAAACAGGATGCGGCGAGGCGCGTGCGCACTGCCAGCTTCAGCACCGCGGA |
| | CAGTGCCTTCGCCCCCGCCTGGCGGCGCGCGCCACCGCCGCCTCAGCACTGAAGGCGCGCTGA |
| | CGTCACTCGCCGGTCCCCCGCAAACTCCCCTTCCCGGCCACCTTGGTCGCGTCCGCGCCGCCGC |
| | CGGCCCAGCCGGACCGCACCACGCGAGGCGCGAGATAGGGGGGCACGGGCGCGACCATCTGC |
| | GCTGCGGCGCCGGCGACTCAGCGCTGCCTCAGTCTGCGGTGGGCAGCGGAGGAGTCGTGTCGT |
| | GCCTGAGAGCGCAGCTGTGCTCCTGGGCACCGCGCAGTCCGCCCCCGCGGCTCCTGGCCAGAC |
| | CACCCCTAGGACCCCCTGCCCCAAGTCGCAGCCGGTCACCAAGCAGGAAGTCAAAGACTTTTT |
| | CCGGTGGGCAAAGGATCACGTGGTTGAGGTGGAGCATGAATTCTACGTCAAAAAGGGTGGAGC |
| | CAAGAAAAGACCCGCCCCCAGTGACGCAGATATAAGTGAGCCCAAACGGGTGCGCGAGTCAG |
| | TTGCGCAGCCATCGACGTCAGACGCGGAAGCTTCGATCAACTACGCGGACAGGTACCAAAACA |
| | AATGTTCTCGTCACGTGGGCATGAATCTGATGCTGTTTCCCTGCAGACAATGCGAGAGACTGAA |
| | TCAGAATTCAAATATCTGCTTCACTCACGGTGTCAAAGACTGTTTAGAGTGCTTTCCCGTGTCA |
| | GAATCTCAACCCGTTTCTGTCGTCAAAAAGGCGTATCAGAAACTGTGCTACATTCATCACATCA |
| | TGGGAAAGGTGCCAGACGCTTGCACTGCTTGCGACCTGGTCAATGTGGACTTGGATGACTGTGT |
| | TTCTGAACAATAAATGACTTAAACCAGGTATGGCTGCCGATGGTTATCTTCCAGATTGGCTCGA |
| | GGACAACCTTAGTGAAGGAATTCGCGAGTGGTGGGCTTTGAAACCTGGAGCCCCTCAACCCAA |
| | GGCAAATCAACAACATCAAGACAACGCTCGAGGTCTTGTGCTTCCGGGTTACAAATACCTTGG |
| | ACCCGGCAACGGACTCGACAAGGGGGAGCCGGTCAACGCAGCAGACGCGGCGGCCCTCGAGC |
| | ACGACAAGGCCTACGACCAGCAGCTCAAGGCCGGAGACAACCCGTACCTCAAGTACAACCACG |
| | CCGACGCCGAGTTCCAGGAGCGGCTCAAAGAAGATACGTCTTTTGGGGGCAACCTCGGGCGAG |
| | CAGTCTTCCAGGCCAAAAAGAGGCTTCTTGAACCTCTTGGTCTGGTTGAGGAAGCGGCTAAGA |
| | CGGCTCCTGGAAAGAAGAGGCCTGTAGAGCAGTCTCCTCAGGAACCGGACTCCTCCGCGGGTA |
| | TTGGCAAATCGGGTGCACAGCCCGCTAAAAAGAGACTCAATTTCGGTCAGACTGGCGACACAG |
| | AGTCAGTCCCAGACCCTCAACCAATCGGAGAACCTCCCGCAGCCCCCTCAGGTGTGGGATCTCT |
| | TACAATGGCTTCAGGTGGTGGCGCACCAGTGGCAGACAATAACGAAGGTGCCGATGGAGTGGG |
| | TAGTTCCTCGGGAAATTGGCATTGCGATTCCCAATGGCTGGGGGACAGAGTCATCACCACCAG |
| | CACCCGAACCTGGGCCCTGCCCACCTACAACAATCACCTCTACAAGCAAATCTCCAACAGCAC |
| | ATCTGGAGGATCTTCAAATGACAACGCCTACTTCGGCTACAGCACCCCCTGGGGGTATTTTGAC |
| | TTCAACAGATTCCACTGCCACTTCTCACCACGTGACTGGCAGCGACTCATCAACAACAACTGGG |
| | GATTCCGGCCTAAGCGACTCAACTTCAAGCTCTTCAACATTCAGGTCAAAGAGGTTACGGACA |
| | ACAATGGAGTCAAGACCATCGCCAATAACCTTACCAGCACGGTCCAGGTCTTCACGGACTCAG |
| | ACTATCAGCTCCCGTACGTGCTCGGGTCGGCTCACGAGGGCTGCCTCCCGCCGTTCCCAGCGGA |
| | CGTTTTCATGATTCCTCAGTACGGGTATCTGACGCTTAATGATGGAAGCCAGGCCGTGGGTCGT |
| | TCGTCCTTTTACTGCCTGGAATATTTCCCGTCGCAAATGCTAAGAACGGGTAACAACTTCCAGT |
| | TCAGCTACGAGTTTGAGAACGTACCTTTCCATAGCAGCTACGCTCACAGCCAAAGCCTGGACCG |
| | ACTAATGAATCCACTCATCGACCAATACTTGTACTATCTCTCAAAGACTATTAACGGTTCTGGA |
| | CAGAATCAACAAACGCTAAAATTCAGTGTGGCCGGACCCAGCAACATGGCTGTCCAGGGAAGA |
| | AACTACATACCTGGACCCAGCTACCGACAACAACGTGTCTCAACCACTGTGACTCAAAACAAC |
| | AACAGCGAATTTGCTTGGCCTGGAGCTTCTTCTTGGGCTCTCAATGGACGTAATAGCTTGATGA |
| | ATCCTGGACCTGCTATGGCCAGCCACAAAGAAGGAGAGGACCGTTTCTTTCCTTTGTCTGGATC |
| | TTTAATTTTTGGCAAACAAGGAACTGGAAGAGACAACGTGGATGCGGACAAAGTCATGATAAC |
| | CAACGAAGAAGAAATTAAAACTACTAACCCGGTAGCAACGGAGTCCTATGGACAAGTGGCCAC |
| | AAACCACCAGAGTGCCCAAGCACAGGCGCAGACCGGCTGGGTTCAAAACCAAGGAATACTTCC |
| | GGGTATGGTTTGGCAGGACAGAGATGTGTACCTGCAAGGACCCATTTGGGCCAAAATTCCTCA |
| | CACGGACGGCAACTTTCACCCTTCTCCGCTGATGGGAGGGTTTGGAATGAAGCACCCGCCTCCT |
| | CAGATCCTCATCAAAAACACACCTGTACCTGCGGATCCTCCAACGGCCTTCAACAAGGACAAG |
| | CTGAACTCTTTCATCACCCAGTATTCTACTGGCCAAGTCAGCGTGGAGATCGAGTGGGAGCTGC |
| | AGAAGGAAAACAGCAAGCGCTGGAACCCGGAGATCCAGTACACTTCCAACTATTACAAGTCTA |
| | ATAATGTTGAATTTGCTGTTAATACTGAAGGTGTATATAGTGAACCCCGCCCCATTGGCACCAG |
| | ATACCTGACTCGTAATCTGTAATCGATTGTTAATCAATAAACCGTTTAATTCGTTTCAGTTGAAC |
| | TTTGGTCTCTGCGTATTTCTTTCTTATCTAGTTTCCATGGCTACGTAGATAAGTAGCATGGCGGG |
| | TTAATCATTAACTACAAGGAACCCCTAGTGATGGAGTTGGCCACTCCCTCTCTGCGCGCTCGCT |
| | CGCTCACTGAGGCCGGGCGACCAAAGGTCGCCCGACGCCCGGGCTTTGCCCGGGCGGCCTCAG |
| | TGAGCGAGCGAGCGCGCAGAGAGGGAGTGGCCAA |
| GFAP-CAP9 | TTGGCCACTCCCTCTCTGCGCGCTCGCTCGCTCACTGAGGCCGGGCGACCAAAGGTCGCCCGAC |
| SEQ ID NO: 9 | GCCCGGGCTTTGCCCGGGCGGCCTCAGTGAGCGAGCGAGCGCGCAGAGAGGGAGTGGCCAACT |
| | CCATCACTAGGGGTTCCTGGAGGGGTGGAGTCGTGACGATATCGATCTAACATATCCTGGTGTG |
| | GAGTAGCGGACGCTGCTATGACAGAGGCTCGGGGGCCTGAGCTGGCTCTGTGAGCTGGGGAGG |
| | AGGCAGACAGCCAGGCCTTGTCTGCAAGCAGACCTGGCAGCATTGGGCTGGCCGCCCCCCAGG |
| | GCCTCCTCTTCATGCCCAGTGAATGACTCACCTTGGCACAGACACAATGTTCGGGGTGGGCACA |
| | GTGCCTGCTTCCCGCCGCACCCCAGCCCCCCTCAAATGCCTTCCGAGAAGCCCATTGAGCAGGG |
| | GGCTTGCATTGCACCCCAGCCTGACAGCCTGGCATCTTGGGATAAAAGCAGCACAGCCCCCTA |
| | GGGGCTGCCCTTGCTGTGTGGCGCCACCGGCGGTGGAGAACAAGGCTCTATTCAGCCTGTGCCC |
| | AGGAAAGGGGATCAGGGGATGCCCAGGCATGGACAGTGGGTGGCAGGGGGGGAGAGGAGGG |
| | CTGTCTGCTTCCCAGAAGTCCAAGGACACAAATGGGTGAGGGGAGAGCTCTCCCCATAGCTGG |
| | GCTGCGGCCCAACCCCACCCCCTCAGGCTATGCCAGGGGGTGTTGCCAGGGGCACCCGGGCAT |
| | CGCCAGTCTAGCCCACTCCTTCATAAAGCCCTCGCATCCCAGGAGCGAGCAGAGCCAGAGCAG |
| | GTTGGAGAGGAGACGCATCACCTCCGCTGCTCGCGGGGATCCTCTAGGGTCACCAAGCAGGAA |
| | GTCAAAGACTTTTTCCGGTGGGCAAAGGATCACGTGGTTGAGGTGGAGCATGAATTCTACGTC |
| | AAAAAGGGTGGAGCCAAGAAAAGACCCGCCCCCAGTGACGCAGATATAAGTGAGCCCAAACG |
| | GGTGCGCGAGTCAGTTGCGCAGCCATCGACGTCAGACGCGGAAGCTTCGATCAACTACGCGGA |
| | CAGGTACCAAAACAAATGTTCTCGTCACGTGGGCATGAATCTGATGCTGTTTCCCTGCAGACAA |
| | TGCGAGAGACTGAATCAGAATTCAAATATCTGCTTCACTCACGGTGTCAAAGACTGTTTAGAGT |
| | GCTTTCCCGTGTCAGAATCTCAACCCGTTTCTGTCGTCAAAAAGGCGTATCAGAAACTGTGCTA |
| | CATTCATCACATCATGGGAAAGGTGCCAGACGCTTGCACTGCTTGCGACCTGGTCAATGTGGAC |
| | TTGGATGACTGTGTTTCTGAACAATAAATGACTTAAACCAGGTATGGCTGCCGATGGTTATCTT |
| | CCAGATTGGCTCGAGGACAACCTTAGTGAAGGAATTCGCGAGTGGTGGGCTTTGAAACCTGGA |
| | GCCCCTCAACCCAAGGCAAATCAACAACATCAAGACAACGCTCGAGGTCTTGTGCTTCCGGGT |
| | TACAAATACCTTGGACCCGGCAACGGACTCGACAAGGGGGAGCCGGTCAACGCAGCAGACGC |
| | GGCGGCCCTCGAGCACGACAAGGCCTACGACCAGCAGCTCAAGGCCGGAGACAACCCGTACCT |
| | CAAGTACAACCACGCCGACGCCGAGTTCCAGGAGCGGCTCAAAGAAGATACGTCTTTTGGGGG |
| | CAACCTCGGGCGAGCAGTCTTCCAGGCCAAAAAGAGGCTTCTTGAACCTCTTGGTCTGGTTGAG |
| | GAAGCGGCTAAGACGGCTCCTGGAAAGAAGAGGCCTGTAGAGCAGTCTCCTCAGGAACCGGA |
| | CTCCTCCGCGGGTATTGGCAAATCGGGTGCACAGCCCGCTAAAAAGAGACTCAATTTCGGTCA |
| | GACTGGCGACACAGAGTCAGTCCCAGACCCTCAACCAATCGGAGAACCTCCCGCAGCCCCCTC |
| | AGGTGTGGGATCTCTTACAATGGCTTCAGGTGGTGGCGCACCAGTGGCAGACAATAACGAAGG |
| | TGCCGATGGAGTGGGTAGTTCCTCGGGAAATTGGCATTGCGATTCCCAATGGCTGGGGGACAG |
| | AGTCATCACCACCAGCACCCGAACCTGGGCCCTGCCCACCTACAACAATCACCTCTACAAGCA |
| | AATCTCCAACAGCACATCTGGAGGATCTTCAAATGACAACGCCTACTTCGGCTACAGCACCCCC |
| | TGGGGGTATTTTGACTTCAACAGATTCCACTGCCACTTCTCACCACGTGACTGGCAGCGACTCA |
| | TCAACAACAACTGGGGATTCCGGCCTAAGCGACTCAACTTCAAGCTCTTCAACATTCAGGTCAA |
| | AGAGGTTACGGACAACAATGGAGTCAAGACCATCGCCAATAACCTTACCAGCACGGTCCAGGT |
| | CTTCACGGACTCAGACTATCAGCTCCCGTACGTGCTCGGGTCGGCTCACGAGGGCTGCCTCCCG |
| | CCGTTCCCAGCGGACGTTTTCATGATTCCTCAGTACGGGTATCTGACGCTTAATGATGGAAGCC |
| | AGGCCGTGGGTCGTTCGTCCTTTTACTGCCTGGAATATTTCCCGTCGCAAATGCTAAGAACGGG |
| | TAACAACTTCCAGTTCAGCTACGAGTTTGAGAACGTACCTTTCCATAGCAGCTACGCTCACAGC |
| | CAAAGCCTGGACCGACTAATGAATCCACTCATCGACCAATACTTGTACTATCTCTCAAAGACTA |
| | TTAACGGTTCTGGACAGAATCAACAAACGCTAAAATTCAGTGTGGCCGGACCCAGCAACATGG |
| | CTGTCCAGGGAAGAAACTACATACCTGGACCCAGCTACCGACAACAACGTGTCTCAACCACTG |
| | TGACTCAAAACAACAACAGCGAATTTGCTTGGCCTGGAGCTTCTTCTTGGGCTCTCAATGGACG |
| | TAATAGCTTGATGAATCCTGGACCTGCTATGGCCAGCCACAAAGAAGGAGAGGACCGTTTCTTT |
| | CCTTTGTCTGGATCTTTAATTTTTGGCAAACAAGGAACTGGAAGAGACAACGTGGATGCGGAC |
| | AAAGTCATGATAACCAACGAAGAAGAAATTAAAACTACTAACCCGGTAGCAACGGAGTCCTAT |
| | GGACAAGTGGCCACAAACCACCAGAGTGCCCAAGCACAGGCGCAGACCGGCTGGGTTCAAAA |
| | CCAAGGAATACTTCCGGGTATGGTTTGGCAGGACAGAGATGTGTACCTGCAAGGACCCATTTG |
| | GGCCAAAATTCCTCACACGGACGGCAACTTTCACCCTTCTCCGCTGATGGGAGGGTTTGGAATG |
| | AAGCACCCGCCTCCTCAGATCCTCATCAAAAACACACCTGTACCTGCGGATCCTCCAACGGCCT |
| | TCAACAAGGACAAGCTGAACTCTTTCATCACCCAGTATTCTACTGGCCAAGTCAGCGTGGAGAT |
| | CGAGTGGGAGCTGCAGAAGGAAAACAGCAAGCGCTGGAACCCGGAGATCCAGTACACTTCCA |
| | ACTATTACAAGTCTAATAATGTTGAATTTGCTGTTAATACTGAAGGTGTATATAGTGAACCCCG |
| | CCCCATTGGCACCAGATACCTGACTCGTAATCTGTAATCGATTGTTAATCAATAAACCGTTTAA |
| | TTCGTTTCAGTTGAACTTTGGTCTCTGCGTATTTCTTTCTTATCTAGTTTCCATGGCTACGTAGAT |
| | AAGTAGCATGGCGGGTTAATCATTAACTACAAGGAACCCCTAGTGATGGAGTTGGCCACTCCC |
| | TCTCTGCGCGCTCGCTCGCTCACTGAGGCCGGGCGACCAAAGGTCGCCCGACGCCCGGGCTTTG |
| | CCCGGGCGGCCTCAGTGAGCGAGCGAGCGCGCAGAGAGGGAGTGGCCAA |
| CAG-CAP9 | TTGGCCACTCCCTCTCTGCGCGCTCGCTCGCTCACTGAGGCCGGGCGACCAAAGGTCGCC |
| SEQ ID NO: 10 | CGACGCCCGGGCTTTGCCCGGGCGGCCTCAGTGAGCGAGCGAGCGCGCAGAGAGGGAGT |
| | GGCCAACTCCATCACTAGGGGTTCCTGGAGGGGTGGAGTCGTGACGATATCCATGCGTCG |
| | ACATAACGCGTCGACATTGATTATTGACTAGTTATTAATAGTAATCAATTACGGGGTCATT |
| | AGTTCATAGCCCATATATGGAGTTCCGCGTTACATAACTTACGGTAAATGGCCCGCCTGG |
| | CTGACCGCCCAACGACCCCCGCCCATTGACGTCAATAATGACGTATGTTCCCATAGTAAC |
| | GCCAATAGGGACTTTCCATTGACGTCAATGGGTGGAGTATTTACGGTAAACTGCCCACTT |
| | GGCAGTACATCAAGTGTATCATATGCCAAGTACGCCCCCTATTGACGTCAATGACGGTAA |
| | ATGGCCCGCCTGGCATTATGCCCAGTACATGACCTTATGGGACTTTCCTACTTGGCAGTAC |
| | ATCTACGTATTAGTCATCGCTATTACCATGTCGAGGCCACGTTCTGCTTCACTCTCCCCAT |
| | CTCCCCCCCCTCCCCACCCCCAATTTTGTATTTATTTATTTTTTAATTATTTTGTGCAGCGA |
| | TGGGGGCGGGGGGGGGGGGCGCGCGCCAGGCGGGGCGGGGCGGGGCGAGGGGCGGGGC |
| | GGGGCGAGGCGGAGAGGTGCGGCGGCAGCCAATCAGAGCGGCGCGCTCCGAAAGTTTCC |
| | TTTTATGGCGAGGCGGCGGCGGCGGCGGCCCTATAAAAAGCGAAGCGCGCGGCGGGCGG |
| | GAGCAAGCTTCGTTTAGTGAACCGTCAGATCGCCTGGAGACGCCATCCACGCTGTTTTGA |
| | CCTCCATAGAAGACACCGGGACCGATCCAGCCTCCGCGGATTCGAATCCCGGCCGGGAA |
| | CGGTGCATTGGAACGCGGATTCCCCGTGCCAAGAGTGACGTAAGTACCGCCTATAGAGTC |
| | TATAGGCCCACAAAAAATGCTTTCTTCTTTTAATATACTTTTTTGTTTATCTTATTTCTAAT |
| | ACTTTCCCTAATCTCTTTCTTTCAGGGCAATAATGATACAATGTATCATGCCTCTTTGCAC |
| | CATTCTAAAGAATAACAGTGATAATTTCTGGGTTAAGGCAATAGCAATATTTCTGCATAT |
| | AAATATTTCTGCATATAAATTGTAACTGATGTAAGAGGTTTCATATTGCTAATAGCAGCTA |
| | CAATCCAGCTACCATTCTGCTTTTATTTTATGGTTGGGATAAGGCTGGATTATTCTGAGTC |
| | CAAGCTAGGCCCTTTTGCTAATCATGTTCATACCTCTTATCTTCCTCCCACAGCTCCTGGG |
| | CAACGTGCTGGTCTGTGTGCTGGCCCATCACTTTGGCAAAGAATTGGGATTCGAACCGGT |
| | CACCAAGCAGGAAGTCAAAGACTTTTTCCGGTGGGCAAAGGATCACGTGGTTGAGGTGG |
| | AGCATGAATTCTACGTCAAAAAGGGTGGAGCCAAGAAAAGACCCGCCCCCAGTGACGCA |
| | GATATAAGTGAGCCCAAACGGGTGCGCGAGTCAGTTGCGCAGCCATCGACGTCAGACGC |
| | GGAAGCTTCGATCAACTACGCGGACAGGTACCAAAACAAATGTTCTCGTCACGTGGGCAT |
| | GAATCTGATGCTGTTTCCCTGCAGACAATGCGAGAGACTGAATCAGAATTCAAATATCTG |
| | CTTCACTCACGGTGTCAAAGACTGTTTAGAGTGCTTTCCCGTGTCAGAATCTCAACCCGTT |
| | TCTGTCGTCAAAAAGGCGTATCAGAAACTGTGCTACATTCATCACATCATGGGAAAGGTG |
| | CCAGACGCTTGCACTGCTTGCGACCTGGTCAATGTGGACTTGGATGACTGTGTTTCTGAAC |
| | AATAAATGACTTAAACCAGGTATGGCTGCCGATGGTTATCTTCCAGATTGGCTCGAGGAC |
| | AACCTTAGTGAAGGAATTCGCGAGTGGTGGGCTTTGAAACCTGGAGCCCCTCAACCCAAG |
| | GCAAATCAACAACATCAAGACAACGCTCGAGGTCTTGTGCTTCCGGGTTACAAATACCTT |
| | GGACCCGGCAACGGACTCGACAAGGGGGAGCCGGTCAACGCAGCAGACGCGGCGGCCCT |
| | CGAGCACGACAAGGCCTACGACCAGCAGCTCAAGGCCGGAGACAACCCGTACCTCAAGT |
| | ACAACCACGCCGACGCCGAGTTCCAGGAGCGGCTCAAAGAAGATACGTCTTTTGGGGGC |
| | AACCTCGGGCGAGCAGTCTTCCAGGCCAAAAAGAGGCTTCTTGAACCTCTTGGTCTGGTT |
| | GAGGAAGCGGCTAAGACGGCTCCTGGAAAGAAGAGGCCTGTAGAGCAGTCTCCTCAGGA |
| | ACCGGACTCCTCCGCGGGTATTGGCAAATCGGGTGCACAGCCCGCTAAAAAGAGACTCA |
| | ATTTCGGTCAGACTGGCGACACAGAGTCAGTCCCAGACCCTCAACCAATCGGAGAACCTC |
| | CCGCAGCCCCCTCAGGTGTGGGATCTCTTACAATGGCTTCAGGTGGTGGCGCACCAGTGG |
| | CAGACAATAACGAAGGTGCCGATGGAGTGGGTAGTTCCTCGGGAAATTGGCATTGCGATT |
| | CCCAATGGCTGGGGGACAGAGTCATCACCACCAGCACCCGAACCTGGGCCCTGCCCACCT |
| | ACAACAATCACCTCTACAAGCAAATCTCCAACAGCACATCTGGAGGATCTTCAAATGACA |
| | ACGCCTACTTCGGCTACAGCACCCCCTGGGGGTATTTTGACTTCAACAGATTCCACTGCCA |
| | CTTCTCACCACGTGACTGGCAGCGACTCATCAACAACAACTGGGGATTCCGGCCTAAGCG |
| | ACTCAACTTCAAGCTCTTCAACATTCAGGTCAAAGAGGTTACGGACAACAATGGAGTCAA |
| | GACCATCGCCAATAACCTTACCAGCACGGTCCAGGTCTTCACGGACTCAGACTATCAGCT |
| | CCCGTACGTGCTCGGGTCGGCTCACGAGGGCTGCCTCCCGCCGTTCCCAGCGGACGTTTT |
| | CATGATTCCTCAGTACGGGTATCTGACGCTTAATGATGGAAGCCAGGCCGTGGGTCGTTC |
| | GTCCTTTTACTGCCTGGAATATTTCCCGTCGCAAATGCTAAGAACGGGTAACAACTTCCA |
| | GTTCAGCTACGAGTTTGAGAACGTACCTTTCCATAGCAGCTACGCTCACAGCCAAAGCCT |
| | GGACCGACTAATGAATCCACTCATCGACCAATACTTGTACTATCTCTCAAAGACTATTAA |
| | CGGTTCTGGACAGAATCAACAAACGCTAAAATTCAGTGTGGCCGGACCCAGCAACATGG |
| | CTGTCCAGGGAAGAAACTACATACCTGGACCCAGCTACCGACAACAACGTGTCTCAACCA |
| | CTGTGACTCAAAACAACAACAGCGAATTTGCTTGGCCTGGAGCTTCTTCTTGGGCTCTCA |
| | ATGGACGTAATAGCTTGATGAATCCTGGACCTGCTATGGCCAGCCACAAAGAAGGAGAG |
| | GACCGTTTCTTTCCTTTGTCTGGATCTTTAATTTTTGGCAAACAAGGAACTGGAAGAGACA |
| | ACGTGGATGCGGACAAAGTCATGATAACCAACGAAGAAGAAATTAAAACTACTAACCCG |
| | GTAGCAACGGAGTCCTATGGACAAGTGGCCACAAACCACCAGAGTGCCCAAGCACAGGC |
| | GCAGACCGGCTGGGTTCAAAACCAAGGAATACTTCCGGGTATGGTTTGGCAGGACAGAG |
| | ATGTGTACCTGCAAGGACCCATTTGGGCCAAAATTCCTCACACGGACGGCAACTTTCACC |
| | CTTCTCCGCTGATGGGAGGGTTTGGAATGAAGCACCCGCCTCCTCAGATCCTCATCAAAA |
| | ACACACCTGTACCTGCGGATCCTCCAACGGCCTTCAACAAGGACAAGCTGAACTCTTTCA |
| | TCACCCAGTATTCTACTGGCCAAGTCAGCGTGGAGATCGAGTGGGAGCTGCAGAAGGAA |
| | AACAGCAAGCGCTGGAACCCGGAGATCCAGTACACTTCCAACTATTACAAGTCTAATAAT |
| | GTTGAATTTGCTGTTAATACTGAAGGTGTATATAGTGAACCCCGCCCCATTGGCACCAGA |
| | TACCTGACTCGTAATCTGTAATCGATTGTTAATCAATAAACCGTTTAATTCGTTTCAGTTG |
| | AACTTTGGTCTCTGCGTATTTCTTTCTTATCTAGTTTCCATGGCTACGTAGATAAGTAGCAT |
| | GGCGGGTTAATCATTAACTACAAGGAACCCCTAGTGATGGAGTTGGCCACTCCCTCTCTG |
| | CGCGCTCGCTCGCTCACTGAGGCCGGGCGACCAAAGGTCGCCCGACGCCCGGGCTTTGCC |
| | CGGGCGGCCTCAGTGAGCGAGCGAGCGCGCAGAGAGGGAGTGGCCAA |
| SYNG-CAP9 | TTGGCCACTCCCTCTCTGCGCGCTCGCTCGCTCACTGAGGCCGGGCGACCAAAGGTCGCC |
| SEQ ID NO: 11 | CGACGCCCGGGCTTTGCCCGGGCGGCCTCAGTGAGCGAGCGAGCGCGCAGAGAGGGAGT |
| | GGCCAACTCCATCACTAGGGGTTCCTGGAGGGGTGGAGTCGTGACGATATCCATGCGTCG |
| | ACATAACGCGTGATCTAACATATCCTGGTGTGGAGTAGCGGACGCTGCTATGACAGAGGC |
| | TCGGGGGCCTGAGCTGGCTCTGTGAGCTGGGGAGGAGGCAGACAGCCAGGCCTTGTCTG |
| | CAAGCAGACCTGGCAGCATTGGGCTGGCCGCCCCCCAGGGCCTCCTCTTCATGCCCAGTG |
| | AATGACTCACCTTGGCACAGACACAATGTTCGGGGTGGGCACAGTGCCTGCTTCCCGCCG |
| | CACCCCAGCCCCCCTCAAATGCCTTCCGAGAAGCCCATTGAGCAGGGGGCTTGCATTGCA |
| | CCCCAGCCTGACAGCCTGGCATCTTGGGATAAAAGCAGCACAGCCCCCTAGGGGCTGCCC |
| | TTGCTGTGTGGCGCCACCGGCGGTGGAGAACAAGGCTCTATTCAGCCTGTGCCCAGGAAA |
| | GGGGATCAGGGGATGCCCAGGCATGGACAGTGGGTGGCAGGGGGGGAGAGGAGGGCTG |
| | TCTGCTTCCCAGAAGTCCAAGGACACAAATGGGTGAGGGGAGAGCTCTCCCCATAGCTGG |
| | GCTGCGGCCCAACCCCACCCCCTCAGGCTATGCCAGGGGGTGTTGCCAGGGGCACCCGGG |
| | CATCGCCAGTCTAGCCCACTCCTTCATAAAGCCCTCGCATCCCAGGAGCGAGCAGAGCCA |
| | GAGCAGGTTGGAGAGGAGACGCATCACCTCCGCTGCTCGCGGGGATCCTCTAGAAGCTTC |
| | GTTTAGTGAACCGTCAGATCGCCTGGAGACGCCATCCACGCTGTTTTGACCTCCATAGAA |
| | GACACCGGGACCGATCCAGCCTCCGCGGATTCGAATCCCGGCCGGGAACGGTGCATTGG |
| | AACGCGGATTCCCCGTGCCAAGAGTGACGTAAGTACCGCCTATAGAGTCTATAGGCCCAC |
| | AAAAAATGCTTTCTTCTTTTAATATACTTTTTTGTTTATCTTATTTCTAATACTTTCCCTAAT |
| | CTCTTTCTTTCAGGGCAATAATGATACAATGTATCATGCCTCTTTGCACCATTCTAAAGAA |
| | TAACAGTGATAATTTCTGGGTTAAGGCAATAGCAATATTTCTGCATATAAATATTTCTGCA |
| | TATAAATTGTAACTGATGTAAGAGGTTTCATATTGCTAATAGCAGCTACAATCCAGCTAC |
| | CATTCTGCTTTTATTTTATGGTTGGGATAAGGCTGGATTATTCTGAGTCCAAGCTAGGCCC |
| | TTTTGCTAATCATGTTCATACCTCTTATCTTCCTCCCACAGCTCCTGGGCAACGTGCTGGTC |
| | TGTGTGCTGGCCCATCACTTTGGCAAAGAATTGGGATTCGAACCGGTCGCCACCGGTCAC |
| | CAAGCAGGAAGTCAAAGACTTTTTCCGGTGGGCAAAGGATCACGTGGTTGAGGTGGAGC |
| | ATGAATTCTACGTCAAAAAGGGTGGAGCCAAGAAAAGACCCGCCCCCAGTGACGCAGAT |
| | ATAAGTGAGCCCAAACGGGTGCGCGAGTCAGTTGCGCAGCCATCGACGTCAGACGCGGA |
| | AGCTTCGATCAACTACGCGGACAGGTACCAAAACAAATGTTCTCGTCACGTGGGCATGAA |
| | TCTGATGCTGTTTCCCTGCAGACAATGCGAGAGACTGAATCAGAATTCAAATATCTGCTT |
| | CACTCACGGTGTCAAAGACTGTTTAGAGTGCTTTCCCGTGTCAGAATCTCAACCCGTTTCT |
| | GTCGTCAAAAAGGCGTATCAGAAACTGTGCTACATTCATCACATCATGGGAAAGGTGCCA |
| | GACGCTTGCACTGCTTGCGACCTGGTCAATGTGGACTTGGATGACTGTGTTTCTGAACAAT |
| | AAATGACTTAAACCAGGTATGGCTGCCGATGGTTATCTTCCAGATTGGCTCGAGGACAAC |
| | CTTAGTGAAGGAATTCGCGAGTGGTGGGCTTTGAAACCTGGAGCCCCTCAACCCAAGGCA |
| | AATCAACAACATCAAGACAACGCTCGAGGTCTTGTGCTTCCGGGTTACAAATACCTTGGA |
| | CCCGGCAACGGACTCGACAAGGGGGAGCCGGTCAACGCAGCAGACGCGGCGGCCCTCGA |
| | GCACGACAAGGCCTACGACCAGCAGCTCAAGGCCGGAGACAACCCGTACCTCAAGTACA |
| | ACCACGCCGACGCCGAGTTCCAGGAGCGGCTCAAAGAAGATACGTCTTTTGGGGGCAAC |
| | CTCGGGCGAGCAGTCTTCCAGGCCAAAAAGAGGCTTCTTGAACCTCTTGGTCTGGTTGAG |
| | GAAGCGGCTAAGACGGCTCCTGGAAAGAAGAGGCCTGTAGAGCAGTCTCCTCAGGAACC |
| | GGACTCCTCCGCGGGTATTGGCAAATCGGGTGCACAGCCCGCTAAAAAGAGACTCAATTT |
| | CGGTCAGACTGGCGACACAGAGTCAGTCCCAGACCCTCAACCAATCGGAGAACCTCCCG |
| | CAGCCCCCTCAGGTGTGGGATCTCTTACAATGGCTTCAGGTGGTGGCGCACCAGTGGCAG |
| | ACAATAACGAAGGTGCCGATGGAGTGGGTAGTTCCTCGGGAAATTGGCATTGCGATTCCC |
| | AATGGCTGGGGGACAGAGTCATCACCACCAGCACCCGAACCTGGGCCCTGCCCACCTAC |
| | AACAATCACCTCTACAAGCAAATCTCCAACAGCACATCTGGAGGATCTTCAAATGACAAC |
| | GCCTACTTCGGCTACAGCACCCCCTGGGGGTATTTTGACTTCAACAGATTCCACTGCCACT |
| | TCTCACCACGTGACTGGCAGCGACTCATCAACAACAACTGGGGATTCCGGCCTAAGCGAC |
| | TCAACTTCAAGCTCTTCAACATTCAGGTCAAAGAGGTTACGGACAACAATGGAGTCAAGA |
| | CCATCGCCAATAACCTTACCAGCACGGTCCAGGTCTTCACGGACTCAGACTATCAGCTCC |
| | CGTACGTGCTCGGGTCGGCTCACGAGGGCTGCCTCCCGCCGTTCCCAGCGGACGTTTTCA |
| | TGATTCCTCAGTACGGGTATCTGACGCTTAATGATGGAAGCCAGGCCGTGGGTCGTTCGT |
| | CCTTTTACTGCCTGGAATATTTCCCGTCGCAAATGCTAAGAACGGGTAACAACTTCCAGTT |
| | CAGCTACGAGTTTGAGAACGTACCTTTCCATAGCAGCTACGCTCACAGCCAAAGCCTGGA |
| | CCGACTAATGAATCCACTCATCGACCAATACTTGTACTATCTCTCAAAGACTATTAACGGT |
| | TCTGGACAGAATCAACAAACGCTAAAATTCAGTGTGGCCGGACCCAGCAACATGGCTGTC |
| | CAGGGAAGAAACTACATACCTGGACCCAGCTACCGACAACAACGTGTCTCAACCACTGT |
| | GACTCAAAACAACAACAGCGAATTTGCTTGGCCTGGAGCTTCTTCTTGGGCTCTCAATGG |
| | ACGTAATAGCTTGATGAATCCTGGACCTGCTATGGCCAGCCACAAAGAAGGAGAGGACC |
| | GTTTCTTTCCTTTGTCTGGATCTTTAATTTTTGGCAAACAAGGAACTGGAAGAGACAACGT |
| | GGATGCGGACAAAGTCATGATAACCAACGAAGAAGAAATTAAAACTACTAACCCGGTAG |
| | CAACGGAGTCCTATGGACAAGTGGCCACAAACCACCAGAGTGCCCAAGCACAGGCGCAG |
| | ACCGGCTGGGTTCAAAACCAAGGAATACTTCCGGGTATGGTTTGGCAGGACAGAGATGT |
| | GTACCTGCAAGGACCCATTTGGGCCAAAATTCCTCACACGGACGGCAACTTTCACCCTTC |
| | TCCGCTGATGGGAGGGTTTGGAATGAAGCACCCGCCTCCTCAGATCCTCATCAAAAACAC |
| | ACCTGTACCTGCGGATCCTCCAACGGCCTTCAACAAGGACAAGCTGAACTCTTTCATCAC |
| | CCAGTATTCTACTGGCCAAGTCAGCGTGGAGATCGAGTGGGAGCTGCAGAAGGAAAACA |
| | GCAAGCGCTGGAACCCGGAGATCCAGTACACTTCCAACTATTACAAGTCTAATAATGTTG |
| | AATTTGCTGTTAATACTGAAGGTGTATATAGTGAACCCCGCCCCATTGGCACCAGATACC |
| | TGACTCGTAATCTGTAATCGATTGTTAATCAATAAACCGTTTAATTCGTTTCAGTTGAACT |
| | TTGGTCTCTGCGTATTTCTTTCTTATCTAGTTTCCATGGCTACGTAGATAAGTAGCATGGC |
| | GGGTTAATCATTAACTACAAGGAACCCCTAGTGATGGAGTTGGCCACTCCCTCTCTGCGC |
| | GCTCGCTCGCTCACTGAGGCCGGGCGACCAAAGGTCGCCCGACGCCCGGGCTTTGCCCGG |
| | GCGGCCTCAGTGAGCGAGCGAGCGCGCAGAGAGGGAGTGGCCAA |
| GFAPG-CAP9 | TTGGCCACTCCCTCTCTGCGCGCTCGCTCGCTCACTGAGGCCGGGCGACCAAAGGTCGCC |
| SEQ ID NO: 12 | CGACGCCCGGGCTTTGCCCGGGCGGCCTCAGTGAGCGAGCGAGCGCGCAGAGAGGGAGT |
| | GGCCAACTCCATCACTAGGGGTTCCTGGAGGGGTGGAGTCGTGACGATATCCATGCGTCG |
| | ACATAACGCGTTAGTATCTGCAGAGGGCCCTGCGTATGAGTGCAAGTGGGTTTTAGGACC |
| | AGGATGAGGCGGGGTGGGGGTGCCTACCTGACGACCGACCCCGACCCACTGGACAAGCA |
| | CCCAACCCCCATTCCCCAAATTGCGCATCCCCTATCAGAGAGGGGGAGGGGAAACAGGA |
| | TGCGGCGAGGCGCGTGCGCACTGCCAGCTTCAGCACCGCGGACAGTGCCTTCGCCCCCGC |
| | CTGGCGGCGCGCGCCACCGCCGCCTCAGCACTGAAGGCGCGCTGACGTCACTCGCCGGTC |
| | CCCCGCAAACTCCCCTTCCCGGCCACCTTGGTCGCGTCCGCGCCGCCGCCGGCCCAGCCG |
| | GACCGCACCACGCGAGGCGCGAGATAGGGGGGCACGGGCGCGACCATCTGCGCTGCGGC |
| | GCCGGCGACTCAGCGCTGCCTCAGTCTGCGGTGGGCAGCGGAGGAGTCGTGTCGTGCCTG |
| | AGAGCGCAGCTGTGCTCCTGGGCACCGCGCAGTCCGCCCCCGCGGCTCCTGGCCAGACCA |
| | CCCCTAGGACCCCCTGCCCCAAGTCGCAGCCAAGCTTCGTTTAGTGAACCGTCAGATCGC |
| | CTGGAGACGCCATCCACGCTGTTTTGACCTCCATAGAAGACACCGGGACCGATCCAGCCT |
| | CCGCGGATTCGAATCCCGGCCGGGAACGGTGCATTGGAACGCGGATTCCCCGTGCCAAG |
| | AGTGACGTAAGTACCGCCTATAGAGTCTATAGGCCCACAAAAAATGCTTTCTTCTTTTAAT |
| | ATACTTTTTTGTTTATCTTATTTCTAATACTTTCCCTAATCTCTTTCTTTCAGGGCAATAATG |
| | ATACAATGTATCATGCCTCTTTGCACCATTCTAAAGAATAACAGTGATAATTTCTGGGTTA |
| | AGGCAATAGCAATATTTCTGCATATAAATATTTCTGCATATAAATTGTAACTGATGTAAG |
| | AGGTTTCATATTGCTAATAGCAGCTACAATCCAGCTACCATTCTGCTTTTATTTTATGGTT |
| | GGGATAAGGCTGGATTATTCTGAGTCCAAGCTAGGCCCTTTTGCTAATCATGTTCATACCT |
| | CTTATCTTCCTCCCACAGCTCCTGGGCAACGTGCTGGTCTGTGTGCTGGCCCATCACTTTG |
| | GCAAAGAATTGGGATTCGAACCGGTCGCCACCGGTCACCAAGCAGGAAGTCAAAGACTT |
| | TTTCCGGTGGGCAAAGGATCACGTGGTTGAGGTGGAGCATGAATTCTACGTCAAAAAGG |
| | GTGGAGCCAAGAAAAGACCCGCCCCCAGTGACGCAGATATAAGTGAGCCCAAACGGGTG |
| | CGCGAGTCAGTTGCGCAGCCATCGACGTCAGACGCGGAAGCTTCGATCAACTACGCGGA |
| | CAGGTACCAAAACAAATGTTCTCGTCACGTGGGCATGAATCTGATGCTGTTTCCCTGCAG |
| | ACAATGCGAGAGACTGAATCAGAATTCAAATATCTGCTTCACTCACGGTGTCAAAGACTG |
| | TTTAGAGTGCTTTCCCGTGTCAGAATCTCAACCCGTTTCTGTCGTCAAAAAGGCGTATCAG |
| | AAACTGTGCTACATTCATCACATCATGGGAAAGGTGCCAGACGCTTGCACTGCTTGCGAC |
| | CTGGTCAATGTGGACTTGGATGACTGTGTTTCTGAACAATAAATGACTTAAACCAGGTAT |
| | GGCTGCCGATGGTTATCTTCCAGATTGGCTCGAGGACAACCTTAGTGAAGGAATTCGCGA |
| | GTGGTGGGCTTTGAAACCTGGAGCCCCTCAACCCAAGGCAAATCAACAACATCAAGACA |
| | ACGCTCGAGGTCTTGTGCTTCCGGGTTACAAATACCTTGGACCCGGCAACGGACTCGACA |
| | AGGGGGAGCCGGTCAACGCAGCAGACGCGGCGGCCCTCGAGCACGACAAGGCCTACGAC |
| | CAGCAGCTCAAGGCCGGAGACAACCCGTACCTCAAGTACAACCACGCCGACGCCGAGTT |
| | CCAGGAGCGGCTCAAAGAAGATACGTCTTTTGGGGGCAACCTCGGGCGAGCAGTCTTCCA |
| | GGCCAAAAAGAGGCTTCTTGAACCTCTTGGTCTGGTTGAGGAAGCGGCTAAGACGGCTCC |
| | TGGAAAGAAGAGGCCTGTAGAGCAGTCTCCTCAGGAACCGGACTCCTCCGCGGGTATTG |
| | GCAAATCGGGTGCACAGCCCGCTAAAAAGAGACTCAATTTCGGTCAGACTGGCGACACA |
| | GAGTCAGTCCCAGACCCTCAACCAATCGGAGAACCTCCCGCAGCCCCCTCAGGTGTGGGA |
| | TCTCTTACAATGGCTTCAGGTGGTGGCGCACCAGTGGCAGACAATAACGAAGGTGCCGAT |
| | GGAGTGGGTAGTTCCTCGGGAAATTGGCATTGCGATTCCCAATGGCTGGGGGACAGAGTC |
| | ATCACCACCAGCACCCGAACCTGGGCCCTGCCCACCTACAACAATCACCTCTACAAGCAA |
| | ATCTCCAACAGCACATCTGGAGGATCTTCAAATGACAACGCCTACTTCGGCTACAGCACC |
| | CCCTGGGGGTATTTTGACTTCAACAGATTCCACTGCCACTTCTCACCACGTGACTGGCAGC |
| | GACTCATCAACAACAACTGGGGATTCCGGCCTAAGCGACTCAACTTCAAGCTCTTCAACA |
| | TTCAGGTCAAAGAGGTTACGGACAACAATGGAGTCAAGACCATCGCCAATAACCTTACC |
| | AGCACGGTCCAGGTCTTCACGGACTCAGACTATCAGCTCCCGTACGTGCTCGGGTCGGCT |
| | CACGAGGGCTGCCTCCCGCCGTTCCCAGCGGACGTTTTCATGATTCCTCAGTACGGGTATC |
| | TGACGCTTAATGATGGAAGCCAGGCCGTGGGTCGTTCGTCCTTTTACTGCCTGGAATATTT |
| | CCCGTCGCAAATGCTAAGAACGGGTAACAACTTCCAGTTCAGCTACGAGTTTGAGAACGT |
| | ACCTTTCCATAGCAGCTACGCTCACAGCCAAAGCCTGGACCGACTAATGAATCCACTCAT |
| | CGACCAATACTTGTACTATCTCTCAAAGACTATTAACGGTTCTGGACAGAATCAACAAAC |
| | GCTAAAATTCAGTGTGGCCGGACCCAGCAACATGGCTGTCCAGGGAAGAAACTACATAC |
| | CTGGACCCAGCTACCGACAACAACGTGTCTCAACCACTGTGACTCAAAACAACAACAGC |
| | GAATTTGCTTGGCCTGGAGCTTCTTCTTGGGCTCTCAATGGACGTAATAGCTTGATGAATC |
| | CTGGACCTGCTATGGCCAGCCACAAAGAAGGAGAGGACCGTTTCTTTCCTTTGTCTGGAT |
| | CTTTAATTTTTGGCAAACAAGGAACTGGAAGAGACAACGTGGATGCGGACAAAGTCATG |
| | ATAACCAACGAAGAAGAAATTAAAACTACTAACCCGGTAGCAACGGAGTCCTATGGACA |
| | AGTGGCCACAAACCACCAGAGTGCCCAAGCACAGGCGCAGACCGGCTGGGTTCAAAACC |
| | AAGGAATACTTCCGGGTATGGTTTGGCAGGACAGAGATGTGTACCTGCAAGGACCCATTT |
| | GGGCCAAAATTCCTCACACGGACGGCAACTTTCACCCTTCTCCGCTGATGGGAGGGTTTG |
| | GAATGAAGCACCCGCCTCCTCAGATCCTCATCAAAAACACACCTGTACCTGCGGATCCTC |
| | CAACGGCCTTCAACAAGGACAAGCTGAACTCTTTCATCACCCAGTATTCTACTGGCCAAG |
| | TCAGCGTGGAGATCGAGTGGGAGCTGCAGAAGGAAAACAGCAAGCGCTGGAACCCGGA |
| | GATCCAGTACACTTCCAACTATTACAAGTCTAATAATGTTGAATTTGCTGTTAATACTGAA |
| | GGTGTATATAGTGAACCCCGCCCCATTGGCACCAGATACCTGACTCGTAATCTGTAATCG |
| | ATTGTTAATCAATAAACCGTTTAATTCGTTTCAGTTGAACTTTGGTCTCTGCGTATTTCTTT |
| | CTTATCTAGTTTCCATGGCTACGTAGATAAGTAGCATGGCGGGTTAATCATTAACTACAA |
| | GGAACCCCTAGTGATGGAGTTGGCCACTCCCTCTCTGCGCGCTCGCTCGCTCACTGAGGC |
| | CGGGCGACCAAAGGTCGCCCGACGCCCGGGCTTTGCCCGGGCGGCCTCAGTGAGCGAGC |
| | GAGCGCGCAGAGAGGGAGTGGCCAA |
| GLOSPLICEF6 | GTGCCAAGAGTGACCTCCTG |
| SEQ ID NO: 13 | |
| CAP5L8 | ACTGCCCCCGCGACCGGCACGTACAACCTCCAGGAAATCGTGCCCGGCAGCGTGTGGATG |
| GBLOCK SEQ | GAGAGGGACGTGTACCTCCAAGGACCCATCTGGGCCAAGATCCCAGAGACGGGGGCGCA |
| ID NO: 14 | CTTTCACCCCTCTCCGGCTATGGGCGGATTCGGACTCAAACACCCACCGCCCATGATGCTC |
| | ATCAAGAACACGCCTGTGCCCGGAAATATCACCAGCTTCTCGGACGTGCCCGTCAGCAGC |
| | TTCATCACCCAGTACAGCACCGGGCAGGTCACCGTGGAGATGGAGTGGGAGCTCAAGAA |
| | GGAAAACTCCAAGAGGTGGAACCCAGAGATCCAGTACACAAACAACTACAACGACCCCC |
| | AGTTTGTGGACTTTGCCCCGGACAGCACCGGGGAATACAGAACCACCAGACCTATCGGA |
| | ACCCGATACCTTACCCGACCCCTTTAA |
| CAP6L8 | ACCGGAGATGTGCATGTTATGGGAGCCTTACCTGGAATGGTGTGGCAAGACAGGGACGT |
| GBLOCK SEQ | CTACCTGCAGGGTCCTATTTGGGCCAAAATTCCTCACACGGATGGACACTTTCACCCATCT |
| ID NO: 15 | CCTCTCATGGGCGGCTTTGGACTTAAGCACCCGCCTCCTCAGATCCTCATCAAAAACACG |
| | CCTGTTCCTGCGAATCCTCCGGCAGAGTTTTCGGCTACAAAGTTTGCTTCATTCATCACCC |
| | AGTATTCCACAGGACAAGTGAGCGTGGAGATTGAATGGGAGCTGCAGAAAGAAAACAGC |
| | AAACGCTGGAATCCCGAAGTGCAATATACATCTAACTATGCAAAATCTGCCAACGTTGAT |
| | TTCACTGTGGACAACAATGGACTTTATACTGAGCCTCGCCCCATTGGCACCCGTTACCTCA |
| | CCCGTCCCCTGTAATCGAT |
| CAPDJ8L8 | ACACAAGCAGCTACCGCAGATGTCAACACACAAGGCGTTCTTCCAGGCATGGTCTGGCAG |
| GBLOCK SEQ | GACAGAGATGTGTACCTTCAGGGGCCCATCTGGGCAAAGATTCCACACACGGACGGACA |
| ID NO: 16 | TTTTCACCCCTCTCCCCTCATGGGTGGATTCGGACTTAAACACCCTCCGCCTCAGATCCTG |
| | ATCAAGAACACGCCTGTACCTGCGGACCCTCCGACCACCTTCAACCAGTCAAAGCTGAAC |
| | TCTTTCATCACCCAGTATTCTACTGGCCAAGTCAGCGTGGAGATCGAGTGGGAGCTGCAG |
| | AAGGAAAACAGCAAGCGCTGGAACCCCGAGATCCAGTACACCTCCAACTACTACAAATC |
| | TACAAGTGTGGACTTTGCTGTTAATACAGAAGGCGTGTACTCTGAACCCCGCCCCATTGG |
| | CACCCGTTACCTCACCCGTAATCTGTAA |
| CAP9L8M | GCACAGGCGCAGACCGGCTGGGTTCAAAACCAAGGAATACTTCCGGGTATGGTTTGGCA |
| GBLOCK SEQ | GGACAGAGATGTGTACCTGCAAGGACCCATTTGGGCCAAAATTCCTCACACGGACGGCA |
| ID NO: 17 | ACTTTCACCCTTCTCCGCTGATGGGAGGGTTTGGAATGAAGCACCCGCCTCCTCAGATCCT |
| | CATCAAAAACACACCTGTACCTGCCGATCCTCCAACGGCCTTCAACAAGGACAAGCTGAA |
| | CTCTTTCATCACCCAGTATTCTACTGGCCAAGTCAGCGTGGAGATCGAGTGGGAGCTGCA |
| | GAAGGAAAACAGCAAGCGGTGGAACCCGGAGATCCAGTACACTTCCAACTATTACAAGT |
| | CTAATAATGTTGAATTTGCTGTTAATACTGAAGGTGTATATAGTGAACCCCGCCCCATTGG |
| | CACCAGATACCTGACTCGTAATCTGTAA |
| TELN-SYNG9- | TATCAGCACACAATAGTCCATTATACGCGCGTATAATGGGCAATTGTGTGCTGATACAGC |
| BSRGI SEQ ID | TGGCACGACAGGTTTCCCGACTGGAAAGCGGGCAGTGAGCGCAACGCAATTAATGTGAG |
| NO: 18 | TTAGCTCACTCATTAGGCACCCCAGGCTTTACACTTTATGCTTCCGGCTCGTATGTTGTGT |
| | GGAATTGTGAGCGGATAACAATTTCACACAGGAAACAGCTATGACCATGATTACGCCAG |
| | ATTTAATTAAGGCCTTAATTAGGCTAGCTTGGCCACTCCCTCTCTGCGCGCTCGCTCGCTC |
| | ACTGAGGCCGGGCGACCAAAGGTCGCCCGACGCCCGGGCTTTGCCCGGGCGGCCTCAGT |
| | GAGCGAGCGAGCGCGCAGAGAGGGAGTGGCCAACTCCATCACTAGGGGTTCCTGGAGGG |
| | GTGGAGTCGTGACGATATCCATGCGTCGACATAACGCGTTAGTATCTGCAGAGGGCCCTG |
| | CGTATGAGTGCAAGTGGGTTTTAGGACCAGGATGAGGCGGGGTGGGGGTGCCTACCTGA |
| | CGACCGACCCCGACCCACTGGACAAGCACCCAACCCCCATTCCCCAAATTGCGCATCCCC |
| | TATCAGAGAGGGGGAGGGGAAACAGGATGCGGCGAGGCGCGTGCGCACTGCCAGCTTCA |
| | GCACCGCGGACAGTGCCTTCGCCCCCGCCTGGCGGCGCGCGCCACCGCCGCCTCAGCACT |
| | GAAGGCGCGCTGACGTCACTCGCCGGTCCCCCGCAAACTCCCCTTCCCGGCCACCTTGGT |
| | CGCGTCCGCGCCGCCGCCGGCCCAGCCGGACCGCACCACGCGAGGCGCGAGATAGGGGG |
| | GCACGGGCGCGACCATCTGCGCTGCGGCGCCGGCGACTCAGCGCTGCCTCAGTCTGCGGT |
| | GGGCAGCGGAGGAGTCGTGTCGTGCCTGAGAGCGCAGCTGTGCTCCTGGGCACCGCGCA |
| | GTCCGCCCCCGCGGCTCCTGGCCAGACCACCCCTAGGACCCCCTGCCCCAAGTCGCAGCC |
| | AAGCTTCGTTTAGTGAACCGTCAGATCGCCTGGAGACGCCATCCACGCTGTTTTGACCTCC |
| | ATAGAAGACACCGGGACCGATCCAGCCTCCGCGGATTCGAATCCCGGCCGGGAACGGTG |
| | CATTGGAACGCGGATTCCCCGTGCCAAGAGTGACGTAAGTACCGCCTATAGAGTCTATAG |
| | GCCCACAAAAAATGCTTTCTTCTTTTAATATACTTTTTTGTTTATCTTATTTCTAATACTTTC |
| | CCTAATCTCTTTCTTTCAGGGCAATAATGATACAATGTATCATGCCTCTTTGCACCATTCT |
| | AAAGAATAACAGTGATAATTTCTGGGTTAAGGCAATAGCAATATTTCTGCATATAAATAT |
| | TTCTGCATATAAATTGTAACTGATGTAAGAGGTTTCATATTGCTAATAGCAGCTACAATCC |
| | AGCTACCATTCTGCTTTTATTTTATGGTTGGGATAAGGCTGGATTATTCTGAGTCCAAGCT |
| | AGGCCCTTTTGCTAATCATGTTCATACCTCTTATCTTCCTCCCACAGCTCCTGGGCAACGT |
| | GCTGGTCTGTGTGCTGGCCCATCACTTTGGCAAAGAATTGGGATTCGAACCGGTCGCCAC |
| | CGGTCACCAAGCAGGAAGTCAAAGACTTTTTCCGGTGGGCAAAGGATCACGTGGTTGAG |
| | GTGGAGCATGAATTCTACGTCAAAAAGGGTGGAGCCAAGAAAAGACCCGCCCCCAGTGA |
| | CGCAGATATAAGTGAGCCCAAACGGGTGCGCGAGTCAGTTGCGCAGCCATCGACGTCAG |
| | ACGCGGAAGCTTCGATCAACTACGCGGACAGGTACCAAAACAAATGTTCTCGTCACGTGG |
| | GCATGAATCTGATGCTGTTTCCCTGCAGACAATGCGAGAGACTGAATCAGAATTCAAATA |
| | TCTGCTTCACTCACGGTGTCAAAGACTGTTTAGAGTGCTTTCCCGTGTCAGAATCTCAACC |
| | CGTTTCTGTCGTCAAAAAGGCGTATCAGAAACTGTGCTACATTCATCACATCATGGGAAA |
| | GGTGCCAGACGCTTGCACTGCTTGCGACCTGGTCAATGTGGACTTGGATGACTGTGTTTCT |
| | GAACAATAAATGACTTAAACCAGGTATGGCTGCCGATGGTTATCTTCCAGATTGGCTCGA |
| | GGACAACCTTAGTGAAGGAATTCGCGAGTGGTGGGCTTTGAAACCTGGAGCCCCTCAACC |
| | CAAGGCAAATCAACAACATCAAGACAACGCTCGAGGTCTTGTGCTTCCGGGTTACAAATA |
| | CCTTGGACCCGGCAACGGACTCGACAAGGGGGAGCCGGTCAACGCAGCAGACGCGGCGG |
| | CCCTCGAGCACGACAAGGCCTACGACCAGCAGCTCAAGGCCGGAGACAACCCGTACCTC |
| | AAGTACAACCACGCCGACGCCGAGTTCCAGGAGCGGCTCAAAGAAGATACGTCTTTTGG |
| | GGGCAACCTCGGGCGAGCAGTCTTCCAGGCCAAAAAGAGGCTTCTTGAACCTCTTGGTCT |
| | GGTTGAGGAAGCGGCTAAGACGGCTCCTGGAAAGAAGAGGCCTGTAGAGCAGTCTCCTC |
| | AGGAACCGGACTCCTCCGCGGGTATTGGCAAATCGGGTGCACAGCCCGCTAAAAAGAGA |
| | CTCAATTTCGGTCAGACTGGCGACACAGAGTCAGTCCCAGACCCTCAACCAATCGGAGAA |
| | CCTCCCGCAGCCCCCTCAGGTGTGGGATCTCTTACAATGGCTTCAGGTGGTGGCGCACCA |
| | GTGGCAGACAATAACGAAGGTGCCGATGGAGTGGGTAGTTCCTCGGGAAATTGGCATTG |
| | CGATTCCCAATGGCTGGGGGACAGAGTCATCACCACCAGCACCCGAACCTGGGCCCTGCC |
| | CACCTACAACAATCACCTCTACAAGCAAATCTCCAACAGCACATCTGGAGGATCTTCAAA |
| | TGACAACGCCTACTTCGGCTACAGCACCCCCTGGGGGTATTTTGACTTCAACAGATTCCA |
| | CTGCCACTTCTCACCACGTGACTGGCAGCGACTCATCAACAACAACTGGGGATTCCGGCC |
| | TAAGCGACTCAACTTCAAGCTCTTCAACATTCAGGTCAAAGAGGTTACGGACAACAATGG |
| | AGTCAAGACCATCGCCAATAACCTTACCAGCACGGTCCAGGTCTTCACGGACTCAGACTA |
| | TCAGCTCCCGTACGTGCTCGGGTCGGCTCACGAGGGCTGCCTCCCGCCGTTCCCAGCGGA |
| | CGTTTTCATGATTCCTCAGTACGGGTATCTGACGCTTAATGATGGAAGCCAGGCCGTGGG |
| | TCGTTCGTCCTTTTACTGCCTGGAATATTTCCCGTCGCAAATGCTAAGAACGGGTAACAAC |
| | TTCCAGTTCAGCTACGAGTTTGAGAACGTACCTTTCCATAGCAGCTACGCTCACAGCCAA |
| | AGCCTGGACCGACTAATGAATCCACTCATCGACCAATACTTGTACTATCTCTCAAAGACT |
| | ATTAACGGTTCTGGACAGAATCAACAAACGCTAAAATTCAGTGTGGCCGGACCCAGCAA |
| | CATGGCTGTCCAGGGAAGAAACTACATACCTGGACCCAGCTACCGACAACAACGTGTCTC |
| | AACCACTGTGACTCAAAACAACAACAGCGAATTTGCTTGGCCTGGAGCTTCTTCTTGGGC |
| | TCTCAATGGACGTAATAGCTTGATGAATCCTGGACCTGCTATGGCCAGCCACAAAGAAGG |
| | AGAGGACCGTTTCTTTCCTTTGTCTGGATCTTTAATTTTTGGCAAACAAGGAACTGGAAGA |
| | GACAACGTGGATGCGGACAAAGTCATGATAACCAACGAAGAAGAAATTAAAACTACTAA |
| | CCCGGTAGCAACGGAGTCCTATGGACAAGTGGCCACAAACCACCAGAGTGTACATCGAT |
| | TGTTAATCAATAAACCGTTTAATTCGTTTCAGTTGAACTTTGGTCTCTGCGTATTTCTTTCT |
| | TATCTAGTTTCCATGGCTACGTAGATAAGTAGCATGGCGGGTTAATCATTAACTACAAGG |
| | AACCCCTAGTGATGGAGTTGGCCACTCCCTCTCTGCGCGCTCGCTCGCTCACTGAGGCCG |
| | GGCGACCAAAGGTCGCCCGACGCCCGGGCTTTGCCCGGGCGGCCTCAGTGAGCGAGCGA |
| | GCGCGCAGAGAGGGAGTGGCCAAGCATGCAATTAACTGGCCGTCGTTTTACAACGTCGTG |
| | ACTGGGAAAACCCTGGCGTTACCCAACTTAATCGCCTTGCAGCACATCCCCCTTTCGCCA |
| | GCTGTATCAGCACACAATTGCCCATTATACGCGCGTATAATGGACTATTGTGTGCTGATA |
| TELN- | TATCAGCACACAATAGTCCATTATACGCGCGTATAATGGGCAATTGTGTGCTGATACAGC |
| GFAPG9- | TGGCACGACAGGTTTCCCGACTGGAAAGCGGGCAGTGAGCGCAACGCAATTAATGTGAG |
| BSRGI SEQ ID | TTAGCTCACTCATTAGGCACCCCAGGCTTTACACTTTATGCTTCCGGCTCGTATGTTGTGT |
| NO: 19 | GGAATTGTGAGCGGATAACAATTTCACACAGGAAACAGCTATGACCATGATTACGCCAG |
| | ATTTAATTAAGGCCTTAATTAGGCTAGCTTGGCCACTCCCTCTCTGCGCGCTCGCTCGCTC |
| | ACTGAGGCCGGGCGACCAAAGGTCGCCCGACGCCCGGGCTTTGCCCGGGCGGCCTCAGT |
| | GAGCGAGCGAGCGCGCAGAGAGGGAGTGGCCAACTCCATCACTAGGGGTTCCTGGAGGG |
| | GTGGAGTCGTGACGATATCCATGCGTCGACATAACGCGTGATCTAACATATCCTGGTGTG |
| | GAGTAGCGGACGCTGCTATGACAGAGGCTCGGGGGCCTGAGCTGGCTCTGTGAGCTGGG |
| | GAGGAGGCAGACAGCCAGGCCTTGTCTGCAAGCAGACCTGGCAGCATTGGGCTGGCCGC |
| | CCCCCAGGGCCTCCTCTTCATGCCCAGTGAATGACTCACCTTGGCACAGACACAATGTTC |
| | GGGGTGGGCACAGTGCCTGCTTCCCGCCGCACCCCAGCCCCCCTCAAATGCCTTCCGAGA |
| | AGCCCATTGAGCAGGGGGCTTGCATTGCACCCCAGCCTGACAGCCTGGCATCTTGGGATA |
| | AAAGCAGCACAGCCCCCTAGGGGCTGCCCTTGCTGTGTGGCGCCACCGGCGGTGGAGAA |
| | CAAGGCTCTATTCAGCCTGTGCCCAGGAAAGGGGATCAGGGGATGCCCAGGCATGGACA |
| | GTGGGTGGCAGGGGGGGAGAGGAGGGCTGTCTGCTTCCCAGAAGTCCAAGGACACAAAT |
| | GGGTGAGGGGAGAGCTCTCCCCATAGCTGGGCTGCGGCCCAACCCCACCCCCTCAGGCTA |
| | TGCCAGGGGGTGTTGCCAGGGGCACCCGGGCATCGCCAGTCTAGCCCACTCCTTCATAAA |
| | GCCCTCGCATCCCAGGAGCGAGCAGAGCCAGAGCAGGTTGGAGAGGAGACGCATCACCT |
| | CCGCTGCTCGCGGGGATCCTCTAGAAGCTTCGTTTAGTGAACCGTCAGATCGCCTGGAGA |
| | CGCCATCCACGCTGTTTTGACCTCCATAGAAGACACCGGGACCGATCCAGCCTCCGCGGA |
| | TTCGAATCCCGGCCGGGAACGGTGCATTGGAACGCGGATTCCCCGTGCCAAGAGTGACGT |
| | AAGTACCGCCTATAGAGTCTATAGGCCCACAAAAAATGCTTTCTTCTTTTAATATACTTTT |
| | TTGTTTATCTTATTTCTAATACTTTCCCTAATCTCTTTCTTTCAGGGCAATAATGATACAAT |
| | GTATCATGCCTCTTTGCACCATTCTAAAGAATAACAGTGATAATTTCTGGGTTAAGGCAAT |
| | AGCAATATTTCTGCATATAAATATTTCTGCATATAAATTGTAACTGATGTAAGAGGTTTCA |
| | TATTGCTAATAGCAGCTACAATCCAGCTACCATTCTGCTTTTATTTTATGGTTGGGATAAG |
| | GCTGGATTATTCTGAGTCCAAGCTAGGCCCTTTTGCTAATCATGTTCATACCTCTTATCTTC |
| | CTCCCACAGCTCCTGGGCAACGTGCTGGTCTGTGTGCTGGCCCATCACTTTGGCAAAGAA |
| | TTGGGATTCGAACCGGTCGCCACCGGTCACCAAGCAGGAAGTCAAAGACTTTTTCCGGTG |
| | GGCAAAGGATCACGTGGTTGAGGTGGAGCATGAATTCTACGTCAAAAAGGGTGGAGCCA |
| | AGAAAAGACCCGCCCCCAGTGACGCAGATATAAGTGAGCCCAAACGGGTGCGCGAGTCA |
| | GTTGCGCAGCCATCGACGTCAGACGCGGAAGCTTCGATCAACTACGCGGACAGGTACCA |
| | AAACAAATGTTCTCGTCACGTGGGCATGAATCTGATGCTGTTTCCCTGCAGACAATGCGA |
| | GAGACTGAATCAGAATTCAAATATCTGCTTCACTCACGGTGTCAAAGACTGTTTAGAGTG |
| | CTTTCCCGTGTCAGAATCTCAACCCGTTTCTGTCGTCAAAAAGGCGTATCAGAAACTGTGC |
| | TACATTCATCACATCATGGGAAAGGTGCCAGACGCTTGCACTGCTTGCGACCTGGTCAAT |
| | GTGGACTTGGATGACTGTGTTTCTGAACAATAAATGACTTAAACCAGGTATGGCTGCCGA |
| | TGGTTATCTTCCAGATTGGCTCGAGGACAACCTTAGTGAAGGAATTCGCGAGTGGTGGGC |
| | TTTGAAACCTGGAGCCCCTCAACCCAAGGCAAATCAACAACATCAAGACAACGCTCGAG |
| | GTCTTGTGCTTCCGGGTTACAAATACCTTGGACCCGGCAACGGACTCGACAAGGGGGAGC |
| | CGGTCAACGCAGCAGACGCGGCGGCCCTCGAGCACGACAAGGCCTACGACCAGCAGCTC |
| | AAGGCCGGAGACAACCCGTACCTCAAGTACAACCACGCCGACGCCGAGTTCCAGGAGCG |
| | GCTCAAAGAAGATACGTCTTTTGGGGGCAACCTCGGGCGAGCAGTCTTCCAGGCCAAAA |
| | AGAGGCTTCTTGAACCTCTTGGTCTGGTTGAGGAAGCGGCTAAGACGGCTCCTGGAAAGA |
| | AGAGGCCTGTAGAGCAGTCTCCTCAGGAACCGGACTCCTCCGCGGGTATTGGCAAATCGG |
| | GTGCACAGCCCGCTAAAAAGAGACTCAATTTCGGTCAGACTGGCGACACAGAGTCAGTC |
| | CCAGACCCTCAACCAATCGGAGAACCTCCCGCAGCCCCCTCAGGTGTGGGATCTCTTACA |
| | ATGGCTTCAGGTGGTGGCGCACCAGTGGCAGACAATAACGAAGGTGCCGATGGAGTGGG |
| | TAGTTCCTCGGGAAATTGGCATTGCGATTCCCAATGGCTGGGGGACAGAGTCATCACCAC |
| | CAGCACCCGAACCTGGGCCCTGCCCACCTACAACAATCACCTCTACAAGCAAATCTCCAA |
| | CAGCACATCTGGAGGATCTTCAAATGACAACGCCTACTTCGGCTACAGCACCCCCTGGGG |
| | GTATTTTGACTTCAACAGATTCCACTGCCACTTCTCACCACGTGACTGGCAGCGACTCATC |
| | AACAACAACTGGGGATTCCGGCCTAAGCGACTCAACTTCAAGCTCTTCAACATTCAGGTC |
| | AAAGAGGTTACGGACAACAATGGAGTCAAGACCATCGCCAATAACCTTACCAGCACGGT |
| | CCAGGTCTTCACGGACTCAGACTATCAGCTCCCGTACGTGCTCGGGTCGGCTCACGAGGG |
| | CTGCCTCCCGCCGTTCCCAGCGGACGTTTTCATGATTCCTCAGTACGGGTATCTGACGCTT |
| | AATGATGGAAGCCAGGCCGTGGGTCGTTCGTCCTTTTACTGCCTGGAATATTTCCCGTCGC |
| | AAATGCTAAGAACGGGTAACAACTTCCAGTTCAGCTACGAGTTTGAGAACGTACCTTTCC |
| | ATAGCAGCTACGCTCACAGCCAAAGCCTGGACCGACTAATGAATCCACTCATCGACCAAT |
| | ACTTGTACTATCTCTCAAAGACTATTAACGGTTCTGGACAGAATCAACAAACGCTAAAAT |
| | TCAGTGTGGCCGGACCCAGCAACATGGCTGTCCAGGGAAGAAACTACATACCTGGACCC |
| | AGCTACCGACAACAACGTGTCTCAACCACTGTGACTCAAAACAACAACAGCGAATTTGCT |
| | TGGCCTGGAGCTTCTTCTTGGGCTCTCAATGGACGTAATAGCTTGATGAATCCTGGACCTG |
| | CTATGGCCAGCCACAAAGAAGGAGAGGACCGTTTCTTTCCTTTGTCTGGATCTTTAATTTT |
| | TGGCAAACAAGGAACTGGAAGAGACAACGTGGATGCGGACAAAGTCATGATAACCAACG |
| | AAGAAGAAATTAAAACTACTAACCCGGTAGCAACGGAGTCCTATGGACAAGTGGCCACA |
| | AACCACCAGAGTGTACATCGATTGTTAATCAATAAACCGTTTAATTCGTTTCAGTTGAACT |
| | TTGGTCTCTGCGTATTTCTTTCTTATCTAGTTTCCATGGCTACGTAGATAAGTAGCATGGC |
| | GGGTTAATCATTAACTACAAGGAACCCCTAGTGATGGAGTTGGCCACTCCCTCTCTGCGC |
| | GCTCGCTCGCTCACTGAGGCCGGGCGACCAAAGGTCGCCCGACGCCCGGGCTTTGCCCGG |
| | GCGGCCTCAGTGAGCGAGCGAGCGCGCAGAGAGGGAGTGGCCAAGCATGCAATTAACTG |
| | GCCGTCGTTTTACAACGTCGTGACTGGGAAAACCCTGGCGTTACCCAACTTAATCGCCTT |
| | GCAGCACATCCCCCTTTCGCCAGCTGTATCAGCACACAATTGCCCATTATACGCGCGTAT |
| | AATGGACTATTGTGTGCTGATA |
| TELN-SYNG5- | TATCAGCACACAATAGTCCATTATACGCGCGTATAATGGGCAATTGTGTGCTGATACAGC |
| BSRGI SEQ ID | TGGCACGACAGGTTTCCCGACTGGAAAGCGGGCAGTGAGCGCAACGCAATTAATGTGAG |
| NO: 20 | TTAGCTCACTCATTAGGCACCCCAGGCTTTACACTTTATGCTTCCGGCTCGTATGTTGTGT |
| | GGAATTGTGAGCGGATAACAATTTCACACAGGAAACAGCTATGACCATGATTACGCCAG |
| | ATTTAATTAAGGCCTTAATTAGGCTAGCTTGGCCACTCCCTCTCTGCGCGCTCGCTCGCTC |
| | ACTGAGGCCGGGCGACCAAAGGTCGCCCGACGCCCGGGCTTTGCCCGGGCGGCCTCAGT |
| | GAGCGAGCGAGCGCGCAGAGAGGGAGTGGCCAACTCCATCACTAGGGGTTCCTGGAGGG |
| | GTGGAGTCGTGACGATATCCATGCGTCGACATAACGCGTTAGTATCTGCAGAGGGCCCTG |
| | CGTATGAGTGCAAGTGGGTTTTAGGACCAGGATGAGGCGGGGTGGGGGTGCCTACCTGA |
| | CGACCGACCCCGACCCACTGGACAAGCACCCAACCCCCATTCCCCAAATTGCGCATCCCC |
| | TATCAGAGAGGGGGAGGGGAAACAGGATGCGGCGAGGCGCGTGCGCACTGCCAGCTTCA |
| | GCACCGCGGACAGTGCCTTCGCCCCCGCCTGGCGGCGCGCGCCACCGCCGCCTCAGCACT |
| | GAAGGCGCGCTGACGTCACTCGCCGGTCCCCCGCAAACTCCCCTTCCCGGCCACCTTGGT |
| | CGCGTCCGCGCCGCCGCCGGCCCAGCCGGACCGCACCACGCGAGGCGCGAGATAGGGGG |
| | GCACGGGCGCGACCATCTGCGCTGCGGCGCCGGCGACTCAGCGCTGCCTCAGTCTGCGGT |
| | GGGCAGCGGAGGAGTCGTGTCGTGCCTGAGAGCGCAGCTGTGCTCCTGGGCACCGCGCA |
| | GTCCGCCCCCGCGGCTCCTGGCCAGACCACCCCTAGGACCCCCTGCCCCAAGTCGCAGCC |
| | AAGCTTCGTTTAGTGAACCGTCAGATCGCCTGGAGACGCCATCCACGCTGTTTTGACCTCC |
| | ATAGAAGACACCGGGACCGATCCAGCCTCCGCGGATTCGAATCCCGGCCGGGAACGGTG |
| | CATTGGAACGCGGATTCCCCGTGCCAAGAGTGACGTAAGTACCGCCTATAGAGTCTATAG |
| | GCCCACAAAAAATGCTTTCTTCTTTTAATATACTTTTTTGTTTATCTTATTTCTAATACTTTC |
| | CCTAATCTCTTTCTTTCAGGGCAATAATGATACAATGTATCATGCCTCTTTGCACCATTCT |
| | AAAGAATAACAGTGATAATTTCTGGGTTAAGGCAATAGCAATATTTCTGCATATAAATAT |
| | TTCTGCATATAAATTGTAACTGATGTAAGAGGTTTCATATTGCTAATAGCAGCTACAATCC |
| | AGCTACCATTCTGCTTTTATTTTATGGTTGGGATAAGGCTGGATTATTCTGAGTCCAAGCT |
| | AGGCCCTTTTGCTAATCATGTTCATACCTCTTATCTTCCTCCCACAGCTCCTGGGCAACGT |
| | GCTGGTCTGTGTGCTGGCCCATCACTTTGGCAAAGAATTGGGATTCGAACCGGTCGCCAC |
| | CGGTCACAAGCAGGAAGTCAAAGACTTTTTCCGGTGGGCAAAGGATCACGTGGTTGAGG |
| | TGGAGCATGAATTCTACGTCAAAAAGGGTGGAGCCAAGAAAAGACCCGCCCCCAGTGAC |
| | GCAGATATAAGTGAGCCCAAACGGGTGCGCGAGTCAGTTGCGCAGCCATCGACGTCAGA |
| | CGCGGAAGCTTCGATCAACTACGCGGACAGGTACCAAAACAAATGTTCTCGTCACGTGGG |
| | CATGAATCTGATGCTGTTTCCCTGCAGACAATGCGAGAGAATGAATCAGAATTCAAATAT |
| | CTGCTTCACTCACGGACAGAAAGACTGTTTAGAGTGCTTTCCCGTGTCAGAATCTCAACC |
| | CGTTTCTGTCGTCAAAAAGGCGTATCAGAAACTGTGCTACATTCATCATATCATGGGAAA |
| | GGTGCCAGACGCTTGCACTGCCTGCGATCTGGTCAATGTGGATTTGGATGACTGCATCTTT |
| | GAACAATAAATGATTTAAATCAGGTATGTCTTTTGTTGATCACCCTCCAGATTGGTTGGAA |
| | GAAGTTGGTGAAGGTCTTCGCGAGTTTTTGGGCCTTGAAGCGGGCCCACCGAAACCAAAA |
| | CCCAATCAGCAGCATCAAGATCAAGCCCGTGGTCTTGTGCTGCCTGGTTATAACTATCTC |
| | GGACCCGGAAACGGTCTCGATCGAGGAGAGCCTGTCAACAGGGCAGACGAGGTCGCGCG |
| | AGAGCACGACATCTCGTACAACGAGCAGCTTGAGGCGGGAGACAACCCCTACCTCAAGT |
| | ACAACCACGCGGACGCCGAGTTTCAGGAGAAGCTCGCCGACGACACATCCTTCGGGGGA |
| | AACCTCGGAAAGGCAGTCTTTCAGGCCAAGAAAAGGGTTCTCGAACCTTTTGGCCTGGTT |
| | GAAGAGGGTGCTAAGACGGCCCCTACCGGAAAGCGGATAGACGACCACTTTCCAAAAAG |
| | AAAGAAGGCCCGGACCGAAGAGGACTCCAAGCCTTCCACCTCGTCAGACGCCGAAGCTG |
| | GACCCAGCGGATCCCAGCAGCTGCAAATCCCAGCCCAACCAGCCTCAAGTTTGGGAGCTG |
| | ATACAATGTCTGCGGGAGGTGGCGGCCCATTGGGCGACAATAACCAAGGTGCCGATGGA |
| | GTGGGCAATGCCTCGGGAGATTGGCATTGCGATTCCACGTGGATGGGGGACAGAGTCGTC |
| | ACCAAGTCCACCCGAACCTGGGTGCTGCCCAGCTACAACAACCACCAGTACCGAGAGAT |
| | CAAAAGCGGCTCCGTCGACGGAAGCAACGCCAACGCCTACTTTGGATACAGCACCCCCTG |
| | GGGGTACTTTGACTTTAACCGCTTCCACAGCCACTGGAGCCCCCGAGACTGGCAAAGACT |
| | CATCAACAACTACTGGGGCTTCAGACCCCGGTCCCTCAGAGTCAAAATCTTCAACATTCA |
| | AGTCAAAGAGGTCACGGTGCAGGACTCCACCACCACCATCGCCAACAACCTCACCTCCAC |
| | CGTCCAAGTGTTTACGGACGACGACTACCAGCTGCCCTACGTCGTCGGCAACGGGACCGA |
| | GGGATGCCTGCCGGCCTTCCCTCCGCAGGTCTTTACGCTGCCGCAGTACGGTTACGCGAC |
| | GCTGAACCGCGACAACACAGAAAATCCCACCGAGAGGAGCAGCTTCTTCTGCCTAGAGT |
| | ACTTTCCCAGCAAGATGCTGAGAACGGGCAACAACTTTGAGTTTACCTACAACTTTGAGG |
| | AGGTGCCCTTCCACTCCAGCTTCGCTCCCAGTCAGAACCTCTTCAAGCTGGCCAACCCGCT |
| | GGTGGACCAGTACTTGTACCGCTTCGTGAGCACAAATAACACTGGCGGAGTCCAGTTCAA |
| | CAAGAACCTGGCCGGGAGATACGCCAACACCTACAAAAACTGGTTCCCGGGGCCCATGG |
| | GCCGAACCCAGGGCTGGAACCTGGGCTCCGGGGTCAACCGCGCCAGTGTCAGCGCCTTCG |
| | CCACGACCAATAGGATGGAGCTCGAGGGCGCGAGTTACCAGGTGCCCCCGCAGCCGAAC |
| | GGCATGACCAACAACCTCCAGGGCAGCAACACCTATGCCCTGGAGAACACTATGATCTTC |
| | AACAGCCAGCCGGCGAACCCGGGCACCACCGCCACGTACCTCGAGGGCAACATGCTCAT |
| | CACCAGCGAGAGCGAGACGCAGCCGGTGAACCGCGTGGCGTACAACGTCGGCGGGCAGA |
| | TGGCCACCAACAACCAGAGCTCTGTACATCGATTGTTAATCAATAAACCGTTTAATTCGTT |
| | TCAGTTGAACTTTGGTCTCTGCGTATTTCTTTCTTATCTAGTTTCCATGGCTACGTAGATAA |
| | GTAGCATGGCGGGTTAATCATTAACTACAAGGAACCCCTAGTGATGGAGTTGGCCACTCC |
| | CTCTCTGCGCGCTCGCTCGCTCACTGAGGCCGGGCGACCAAAGGTCGCCCGACGCCCGGG |
| | CTTTGCCCGGGCGGCCTCAGTGAGCGAGCGAGCGCGCAGAGAGGGAGTGGCCAAGCATG |
| | CAATTAACTGGCCGTCGTTTTACAACGTCGTGACTGGGAAAACCCTGGCGTTACCCAACT |
| | TAATCGCCTTGCAGCACATCCCCCTTTCGCCAGCTGTATCAGCACACAATTGCCCATTATA |
| | CGCGCGTATAATGGACTATTGTGTGCTGATA |
| TELN- | TATCAGCACACAATAGTCCATTATACGCGCGTATAATGGGCAATTGTGTGCTGATACAGC |
| GFAPG5- | TGGCACGACAGGTTTCCCGACTGGAAAGCGGGCAGTGAGCGCAACGCAATTAATGTGAG |
| BSRGI SEQ ID | TTAGCTCACTCATTAGGCACCCCAGGCTTTACACTTTATGCTTCCGGCTCGTATGTTGTGT |
| NO: 21 | GGAATTGTGAGCGGATAACAATTTCACACAGGAAACAGCTATGACCATGATTACGCCAG |
| | ATTTAATTAAGGCCTTAATTAGGCTAGCTTGGCCACTCCCTCTCTGCGCGCTCGCTCGCTC |
| | ACTGAGGCCGGGCGACCAAAGGTCGCCCGACGCCCGGGCTTTGCCCGGGCGGCCTCAGT |
| | GAGCGAGCGAGCGCGCAGAGAGGGAGTGGCCAACTCCATCACTAGGGGTTCCTGGAGGG |
| | GTGGAGTCGTGACGATATCCATGCGTCGACATAACGCGTGATCTAACATATCCTGGTGTG |
| | GAGTAGCGGACGCTGCTATGACAGAGGCTCGGGGGCCTGAGCTGGCTCTGTGAGCTGGG |
| | GAGGAGGCAGACAGCCAGGCCTTGTCTGCAAGCAGACCTGGCAGCATTGGGCTGGCCGC |
| | CCCCCAGGGCCTCCTCTTCATGCCCAGTGAATGACTCACCTTGGCACAGACACAATGTTC |
| | GGGGTGGGCACAGTGCCTGCTTCCCGCCGCACCCCAGCCCCCCTCAAATGCCTTCCGAGA |
| | AGCCCATTGAGCAGGGGGCTTGCATTGCACCCCAGCCTGACAGCCTGGCATCTTGGGATA |
| | AAAGCAGCACAGCCCCCTAGGGGCTGCCCTTGCTGTGTGGCGCCACCGGCGGTGGAGAA |
| | CAAGGCTCTATTCAGCCTGTGCCCAGGAAAGGGGATCAGGGGATGCCCAGGCATGGACA |
| | GTGGGTGGCAGGGGGGGAGAGGAGGGCTGTCTGCTTCCCAGAAGTCCAAGGACACAAAT |
| | GGGTGAGGGGAGAGCTCTCCCCATAGCTGGGCTGCGGCCCAACCCCACCCCCTCAGGCTA |
| | TGCCAGGGGGTGTTGCCAGGGGCACCCGGGCATCGCCAGTCTAGCCCACTCCTTCATAAA |
| | GCCCTCGCATCCCAGGAGCGAGCAGAGCCAGAGCAGGTTGGAGAGGAGACGCATCACCT |
| | CCGCTGCTCGCGGGGATCCTCTAGAAGCTTCGTTTAGTGAACCGTCAGATCGCCTGGAGA |
| | CGCCATCCACGCTGTTTTGACCTCCATAGAAGACACCGGGACCGATCCAGCCTCCGCGGA |
| | TTCGAATCCCGGCCGGGAACGGTGCATTGGAACGCGGATTCCCCGTGCCAAGAGTGACGT |
| | AAGTACCGCCTATAGAGTCTATAGGCCCACAAAAAATGCTTTCTTCTTTTAATATACTTTT |
| | TTGTTTATCTTATTTCTAATACTTTCCCTAATCTCTTTCTTTCAGGGCAATAATGATACAAT |
| | GTATCATGCCTCTTTGCACCATTCTAAAGAATAACAGTGATAATTTCTGGGTTAAGGCAAT |
| | AGCAATATTTCTGCATATAAATATTTCTGCATATAAATTGTAACTGATGTAAGAGGTTTCA |
| | TATTGCTAATAGCAGCTACAATCCAGCTACCATTCTGCTTTTATTTTATGGTTGGGATAAG |
| | GCTGGATTATTCTGAGTCCAAGCTAGGCCCTTTTGCTAATCATGTTCATACCTCTTATCTTC |
| | CTCCCACAGCTCCTGGGCAACGTGCTGGTCTGTGTGCTGGCCCATCACTTTGGCAAAGAA |
| | TTGGGATTCGAACCGGTCGCCACCGGTCACCAAGCAGGAAGTCAAAGACTTTTTCCGGTG |
| | GGCAAAGGATCACGTGGTTGAGGTGGAGCATGAATTCTACGTCAAAAAGGGTGGAGCCA |
| | AGAAAAGACCCGCCCCCAGTGACGCAGATATAAGTGAGCCCAAACGGGTGCGCGAGTCA |
| | GTTGCGCAGCCATCGACGTCAGACGCGGAAGCTTCGATCAACTACGCGGACAGGTACCA |
| | AAACAAATGTTCTCGTCACGTGGGCATGAATCTGATGCTGTTTCCCTGCAGACAATGCGA |
| | GAGAATGAATCAGAATTCAAATATCTGCTTCACTCACGGACAGAAAGACTGTTTAGAGTG |
| | CTTTCCCGTGTCAGAATCTCAACCCGTTTCTGTCGTCAAAAAGGCGTATCAGAAACTGTGC |
| | TACATTCATCATATCATGGGAAAGGTGCCAGACGCTTGCACTGCCTGCGATCTGGTCAAT |
| | GTGGATTTGGATGACTGCATCTTTGAACAATAAATGATTTAAATCAGGTATGTCTTTTGTT |
| | GATCACCCTCCAGATTGGTTGGAAGAAGTTGGTGAAGGTCTTCGCGAGTTTTTGGGCCTT |
| | GAAGCGGGCCCACCGAAACCAAAACCCAATCAGCAGCATCAAGATCAAGCCCGTGGTCT |
| | TGTGCTGCCTGGTTATAACTATCTCGGACCCGGAAACGGTCTCGATCGAGGAGAGCCTGT |
| | CAACAGGGCAGACGAGGTCGCGCGAGAGCACGACATCTCGTACAACGAGCAGCTTGAGG |
| | CGGGAGACAACCCCTACCTCAAGTACAACCACGCGGACGCCGAGTTTCAGGAGAAGCTC |
| | GCCGACGACACATCCTTCGGGGGAAACCTCGGAAAGGCAGTCTTTCAGGCCAAGAAAAG |
| | GGTTCTCGAACCTTTTGGCCTGGTTGAAGAGGGTGCTAAGACGGCCCCTACCGGAAAGCG |
| | GATAGACGACCACTTTCCAAAAAGAAAGAAGGCCCGGACCGAAGAGGACTCCAAGCCTT |
| | CCACCTCGTCAGACGCCGAAGCTGGACCCAGCGGATCCCAGCAGCTGCAAATCCCAGCCC |
| | AACCAGCCTCAAGTTTGGGAGCTGATACAATGTCTGCGGGAGGTGGCGGCCCATTGGGCG |
| | ACAATAACCAAGGTGCCGATGGAGTGGGCAATGCCTCGGGAGATTGGCATTGCGATTCC |
| | ACGTGGATGGGGGACAGAGTCGTCACCAAGTCCACCCGAACCTGGGTGCTGCCCAGCTA |
| | CAACAACCACCAGTACCGAGAGATCAAAAGCGGCTCCGTCGACGGAAGCAACGCCAACG |
| | CCTACTTTGGATACAGCACCCCCTGGGGGTACTTTGACTTTAACCGCTTCCACAGCCACTG |
| | GAGCCCCCGAGACTGGCAAAGACTCATCAACAACTACTGGGGCTTCAGACCCCGGTCCCT |
| | CAGAGTCAAAATCTTCAACATTCAAGTCAAAGAGGTCACGGTGCAGGACTCCACCACCAC |
| | CATCGCCAACAACCTCACCTCCACCGTCCAAGTGTTTACGGACGACGACTACCAGCTGCC |
| | CTACGTCGTCGGCAACGGGACCGAGGGATGCCTGCCGGCCTTCCCTCCGCAGGTCTTTAC |
| | GCTGCCGCAGTACGGTTACGCGACGCTGAACCGCGACAACACAGAAAATCCCACCGAGA |
| | GGAGCAGCTTCTTCTGCCTAGAGTACTTTCCCAGCAAGATGCTGAGAACGGGCAACAACT |
| | TTGAGTTTACCTACAACTTTGAGGAGGTGCCCTTCCACTCCAGCTTCGCTCCCAGTCAGAA |
| | CCTCTTCAAGCTGGCCAACCCGCTGGTGGACCAGTACTTGTACCGCTTCGTGAGCACAAA |
| | TAACACTGGCGGAGTCCAGTTCAACAAGAACCTGGCCGGGAGATACGCCAACACCTACA |
| | AAAACTGGTTCCCGGGGCCCATGGGCCGAACCCAGGGCTGGAACCTGGGCTCCGGGGTC |
| | AACCGCGCCAGTGTCAGCGCCTTCGCCACGACCAATAGGATGGAGCTCGAGGGCGCGAG |
| | TTACCAGGTGCCCCCGCAGCCGAACGGCATGACCAACAACCTCCAGGGCAGCAACACCT |
| | ATGCCCTGGAGAACACTATGATCTTCAACAGCCAGCCGGCGAACCCGGGCACCACCGCC |
| | ACGTACCTCGAGGGCAACATGCTCATCACCAGCGAGAGCGAGACGCAGCCGGTGAACCG |
| | CGTGGCGTACAACGTCGGCGGGCAGATGGCCACCAACAACCAGAGCTCTGTACATCGATT |
| | GTTAATCAATAAACCGTTTAATTCGTTTCAGTTGAACTTTGGTCTCTGCGTATTTCTTTCTT |
| | ATCTAGTTTCCATGGCTACGTAGATAAGTAGCATGGCGGGTTAATCATTAACTACAAGGA |
| | ACCCCTAGTGATGGAGTTGGCCACTCCCTCTCTGCGCGCTCGCTCGCTCACTGAGGCCGG |
| | GCGACCAAAGGTCGCCCGACGCCCGGGCTTTGCCCGGGCGGCCTCAGTGAGCGAGCGAG |
| | CGCGCAGAGAGGGAGTGGCCAAGCATGCAATTAACTGGCCGTCGTTTTACAACGTCGTGA |
| | CTGGGAAAACCCTGGCGTTACCCAACTTAATCGCCTTGCAGCACATCCCCCTTTCGCCAG |
| | CTGTATCAGCACACAATTGCCCATTATACGCGCGTATAATGGACTATTGTGTGCTGATA |
| TELN-SYNG6- | TATCAGCACACAATAGTCCATTATACGCGCGTATAATGGGCAATTGTGTGCTGATACAGC |
| BSRGI SEQ ID | TGGCACGACAGGTTTCCCGACTGGAAAGCGGGCAGTGAGCGCAACGCAATTAATGTGAG |
| NO: 22 | TTAGCTCACTCATTAGGCACCCCAGGCTTTACACTTTATGCTTCCGGCTCGTATGTTGTGT |
| | GGAATTGTGAGCGGATAACAATTTCACACAGGAAACAGCTATGACCATGATTACGCCAG |
| | ATTTAATTAAGGCCTTAATTAGGCTAGCTTGGCCACTCCCTCTCTGCGCGCTCGCTCGCTC |
| | ACTGAGGCCGGGCGACCAAAGGTCGCCCGACGCCCGGGCTTTGCCCGGGCGGCCTCAGT |
| | GAGCGAGCGAGCGCGCAGAGAGGGAGTGGCCAACTCCATCACTAGGGGTTCCTGGAGGG |
| | GTGGAGTCGTGACGATATCCATGCGTCGACATAACGCGTTAGTATCTGCAGAGGGCCCTG |
| | CGTATGAGTGCAAGTGGGTTTTAGGACCAGGATGAGGCGGGGTGGGGGTGCCTACCTGA |
| | CGACCGACCCCGACCCACTGGACAAGCACCCAACCCCCATTCCCCAAATTGCGCATCCCC |
| | TATCAGAGAGGGGGAGGGGAAACAGGATGCGGCGAGGCGCGTGCGCACTGCCAGCTTCA |
| | GCACCGCGGACAGTGCCTTCGCCCCCGCCTGGCGGCGCGCGCCACCGCCGCCTCAGCACT |
| | GAAGGCGCGCTGACGTCACTCGCCGGTCCCCCGCAAACTCCCCTTCCCGGCCACCTTGGT |
| | CGCGTCCGCGCCGCCGCCGGCCCAGCCGGACCGCACCACGCGAGGCGCGAGATAGGGGG |
| | GCACGGGCGCGACCATCTGCGCTGCGGCGCCGGCGACTCAGCGCTGCCTCAGTCTGCGGT |
| | GGGCAGCGGAGGAGTCGTGTCGTGCCTGAGAGCGCAGCTGTGCTCCTGGGCACCGCGCA |
| | GTCCGCCCCCGCGGCTCCTGGCCAGACCACCCCTAGGACCCCCTGCCCCAAGTCGCAGCC |
| | AAGCTTCGTTTAGTGAACCGTCAGATCGCCTGGAGACGCCATCCACGCTGTTTTGACCTCC |
| | ATAGAAGACACCGGGACCGATCCAGCCTCCGCGGATTCGAATCCCGGCCGGGAACGGTG |
| | CATTGGAACGCGGATTCCCCGTGCCAAGAGTGACGTAAGTACCGCCTATAGAGTCTATAG |
| | GCCCACAAAAAATGCTTTCTTCTTTTAATATACTTTTTTGTTTATCTTATTTCTAATACTTTC |
| | CCTAATCTCTTTCTTTCAGGGCAATAATGATACAATGTATCATGCCTCTTTGCACCATTCT |
| | AAAGAATAACAGTGATAATTTCTGGGTTAAGGCAATAGCAATATTTCTGCATATAAATAT |
| | TTCTGCATATAAATTGTAACTGATGTAAGAGGTTTCATATTGCTAATAGCAGCTACAATCC |
| | AGCTACCATTCTGCTTTTATTTTATGGTTGGGATAAGGCTGGATTATTCTGAGTCCAAGCT |
| | AGGCCCTTTTGCTAATCATGTTCATACCTCTTATCTTCCTCCCACAGCTCCTGGGCAACGT |
| | GCTGGTCTGTGTGCTGGCCCATCACTTTGGCAAAGAATTGGGATTCGAACCGGTCGCCAC |
| | CGGTCACAAGCAGGAAGTCAAAGACTTTTTCCGGTGGGCAAAGGATCACGTGGTTGAGG |
| | TGGAGCATGAATTCTACGTCAAAAAGGGTGGAGCCAAGAAAAGACCCGCCCCCAGTGAC |
| | GCAGATATAAGTGAGCCCAAACGGGTGCGCGAGTCAGTTGCGCAGCCATCGACGTCAGA |
| | CGCGGAAGCTTCGATCAACTACGCGGACAGGTACCAAAACAAATGTTCTCGTCACGTGGG |
| | CATGAATCTGATGCTGTTTCCCTGCAGACAATGCGAGAGAATGAATCAGAATTCAAATAT |
| | CTGCTTCACTCACGGACAGAAAGACTGTTTAGAGTGCTTTCCCGTGTCAGAATCTCAACC |
| | CGTTTCTGTCGTCAAAAAGGCGTATCAGAAACTGTGCTACATTCATCATATCATGGGAAA |
| | GGTGCCAGACGCTTGCACTGCCTGCGATCTGGTCAATGTGGATTTGGATGACTGCATCTTT |
| | GAACAATAAATGATTTAAATCAGGTATGGCTGCCGATGGTTATCTTCCAGATTGGCTCGA |
| | GGACAACCTCTCTGAGGGCATTCGCGAGTGGTGGGACTTGAAACCTGGAGCCCCGAAAC |
| | CCAAAGCCAACCAGCAAAAGCAGGACGACGGCCGGGGTCTGGTGCTTCCTGGCTACAAG |
| | TACCTCGGACCCTTCAACGGACTCGACAAGGGGGAGCCCGTCAACGCGGCGGATGCAGC |
| | GGCCCTCGAGCACGACAAGGCCTACGACCAGCAGCTCAAAGCGGGTGACAATCCGTACC |
| | TGCGGTATAACCACGCCGACGCCGAGTTTCAGGAGCGTCTGCAAGAAGATACGTCTTTTG |
| | GGGGCAACCTCGGGCGAGCAGTCTTCCAGGCCAAGAAGAGGGTTCTCGAACCTTTTGGTC |
| | TGGTTGAGGAAGGTGCTAAGACGGCTCCTGGAAAGAAACGTCCGGTAGAGCAGTCGCCA |
| | CAAGAGCCAGACTCCTCCTCGGGCATTGGCAAGACAGGCCAGCAGCCCGCTAAAAAGAG |
| | ACTCAATTTTGGTCAGACTGGCGACTCAGAGTCAGTCCCCGACCCACAACCTCTCGGAGA |
| | ACCTCCAGCAACCCCCGCTGCTGTGGGACCTACTACAATGGCTTCAGGCGGTGGCGCACC |
| | AATGGCAGACAATAACGAAGGCGCCGACGGAGTGGGTAATGCCTCAGGAAATTGGCATT |
| | GCGATTCCACATGGCTGGGCGACAGAGTCATCACCACCAGCACCCGAACATGGGCCTTGC |
| | CCACCTATAACAACCACCTCTACAAGCAAATCTCCAGTGCTTCAACGGGGGCCAGCAACG |
| | ACAACCACTACTTCGGCTACAGCACCCCCTGGGGGTATTTTGATTTCAACAGATTCCACTG |
| | CCATTTCTCACCACGTGACTGGCAGCGACTCATCAACAACAATTGGGGATTCCGGCCCAA |
| | GAGACTCAACTTCAAGCTCTTCAACATCCAAGTCAAGGAGGTCACGACGAATGATGGCGT |
| | CACGACCATCGCTAATAACCTTACCAGCACGGTTCAAGTCTTCTCGGACTCGGAGTACCA |
| | GTTGCCGTACGTCCTCGGCTCTGCGCACCAGGGCTGCCTCCCTCCGTTCCCGGCGGACGTG |
| | TTCATGATTCCGCAGTACGGCTACCTAACGCTCAACAATGGCAGCCAGGCAGTGGGACGG |
| | TCATCCTTTTACTGCCTGGAATATTTCCCATCGCAGATGCTGAGAACGGGCAATAACTTTA |
| | CCTTCAGCTACACCTTCGAGGACGTGCCTTTCCACAGCAGCTACGCGCACAGCCAGAGCC |
| | TGGACCGGCTGATGAATCCTCTCATCGACCAGTACCTGTATTACCTGAACAGAACTCAGA |
| | ATCAGTCCGGAAGTGCCCAAAACAAGGACTTGCTGTTTAGCCGGGGGTCTCCAGCTGGCA |
| | TGTCTGTTCAGCCCAAAAACTGGCTACCTGGACCCTGTTACCGGCAGCAGCGCGTTTCTA |
| | AAACAAAAACAGACAACAACAACAGCAACTTTACCTGGACTGGTGCTTCAAAATATAAC |
| | CTTAATGGGCGTGAATCTATAATCAACCCTGGCACTGCTATGGCCTCACACAAAGACGAC |
| | AAAGACAAGTTCTTTCCCATGAGCGGTGTCATGATTTTTGGAAAGGAGAGCGCCGGAGCT |
| | TCAAACACTGCATTGGACAATGTCATGATCACAGACGAAGAGGAAATCAAAGCCACTAA |
| | CCCCGTGGCCACCGAAAGATTTGGGACTGTGGCAGTCAATCTCCAGAGTGTACATCGATT |
| | GTTAATCAATAAACCGTTTAATTCGTTTCAGTTGAACTTTGGTCTCTGCGTATTTCTTTCTT |
| | ATCTAGTTTCCATGGCTACGTAGATAAGTAGCATGGCGGGTTAATCATTAACTACAAGGA |
| | ACCCCTAGTGATGGAGTTGGCCACTCCCTCTCTGCGCGCTCGCTCGCTCACTGAGGCCGG |
| | GCGACCAAAGGTCGCCCGACGCCCGGGCTTTGCCCGGGCGGCCTCAGTGAGCGAGCGAG |
| | CGCGCAGAGAGGGAGTGGCCAAGCATGCAATTAACTGGCCGTCGTTTTACAACGTCGTGA |
| | CTGGGAAAACCCTGGCGTTACCCAACTTAATCGCCTTGCAGCACATCCCCCTTTCGCCAG |
| | CTGTATCAGCACACAATTGCCCATTATACGCGCGTATAATGGACTATTGTGTGCTGATA |
| TELN- | TATCAGCACACAATAGTCCATTATACGCGCGTATAATGGGCAATTGTGTGCTGATACAGC |
| GFAPG6- | TGGCACGACAGGTTTCCCGACTGGAAAGCGGGCAGTGAGCGCAACGCAATTAATGTGAG |
| BSRGI SEQ ID | TTAGCTCACTCATTAGGCACCCCAGGCTTTACACTTTATGCTTCCGGCTCGTATGTTGTGT |
| NO: 23 | GGAATTGTGAGCGGATAACAATTTCACACAGGAAACAGCTATGACCATGATTACGCCAG |
| | ATTTAATTAAGGCCTTAATTAGGCTAGCTTGGCCACTCCCTCTCTGCGCGCTCGCTCGCTC |
| | ACTGAGGCCGGGCGACCAAAGGTCGCCCGACGCCCGGGCTTTGCCCGGGCGGCCTCAGT |
| | GAGCGAGCGAGCGCGCAGAGAGGGAGTGGCCAACTCCATCACTAGGGGTTCCTGGAGGG |
| | GTGGAGTCGTGACGATATCCATGCGTCGACATAACGCGTGATCTAACATATCCTGGTGTG |
| | GAGTAGCGGACGCTGCTATGACAGAGGCTCGGGGGCCTGAGCTGGCTCTGTGAGCTGGG |
| | GAGGAGGCAGACAGCCAGGCCTTGTCTGCAAGCAGACCTGGCAGCATTGGGCTGGCCGC |
| | CCCCCAGGGCCTCCTCTTCATGCCCAGTGAATGACTCACCTTGGCACAGACACAATGTTC |
| | GGGGTGGGCACAGTGCCTGCTTCCCGCCGCACCCCAGCCCCCCTCAAATGCCTTCCGAGA |
| | AGCCCATTGAGCAGGGGGCTTGCATTGCACCCCAGCCTGACAGCCTGGCATCTTGGGATA |
| | AAAGCAGCACAGCCCCCTAGGGGCTGCCCTTGCTGTGTGGCGCCACCGGCGGTGGAGAA |
| | CAAGGCTCTATTCAGCCTGTGCCCAGGAAAGGGGATCAGGGGATGCCCAGGCATGGACA |
| | GTGGGTGGCAGGGGGGGAGAGGAGGGCTGTCTGCTTCCCAGAAGTCCAAGGACACAAAT |
| | GGGTGAGGGGAGAGCTCTCCCCATAGCTGGGCTGCGGCCCAACCCCACCCCCTCAGGCTA |
| | TGCCAGGGGGTGTTGCCAGGGGCACCCGGGCATCGCCAGTCTAGCCCACTCCTTCATAAA |
| | GCCCTCGCATCCCAGGAGCGAGCAGAGCCAGAGCAGGTTGGAGAGGAGACGCATCACCT |
| | CCGCTGCTCGCGGGGATCCTCTAGAAGCTTCGTTTAGTGAACCGTCAGATCGCCTGGAGA |
| | CGCCATCCACGCTGTTTTGACCTCCATAGAAGACACCGGGACCGATCCAGCCTCCGCGGA |
| | TTCGAATCCCGGCCGGGAACGGTGCATTGGAACGCGGATTCCCCGTGCCAAGAGTGACGT |
| | AAGTACCGCCTATAGAGTCTATAGGCCCACAAAAAATGCTTTCTTCTTTTAATATACTTTT |
| | TTGTTTATCTTATTTCTAATACTTTCCCTAATCTCTTTCTTTCAGGGCAATAATGATACAAT |
| | GTATCATGCCTCTTTGCACCATTCTAAAGAATAACAGTGATAATTTCTGGGTTAAGGCAAT |
| | AGCAATATTTCTGCATATAAATATTTCTGCATATAAATTGTAACTGATGTAAGAGGTTTCA |
| | TATTGCTAATAGCAGCTACAATCCAGCTACCATTCTGCTTTTATTTTATGGTTGGGATAAG |
| | GCTGGATTATTCTGAGTCCAAGCTAGGCCCTTTTGCTAATCATGTTCATACCTCTTATCTTC |
| | CTCCCACAGCTCCTGGGCAACGTGCTGGTCTGTGTGCTGGCCCATCACTTTGGCAAAGAA |
| | TTGGGATTCGAACCGGTCGCCACCGGTCACCAAGCAGGAAGTCAAAGACTTTTTCCGGTG |
| | GGCAAAGGATCACGTGGTTGAGGTGGAGCATGAATTCTACGTCAAAAAGGGTGGAGCCA |
| | AGAAAAGACCCGCCCCCAGTGACGCAGATATAAGTGAGCCCAAACGGGTGCGCGAGTCA |
| | GTTGCGCAGCCATCGACGTCAGACGCGGAAGCTTCGATCAACTACGCGGACAGGTACCA |
| | AAACAAATGTTCTCGTCACGTGGGCATGAATCTGATGCTGTTTCCCTGCAGACAATGCGA |
| | GAGAATGAATCAGAATTCAAATATCTGCTTCACTCACGGACAGAAAGACTGTTTAGAGTG |
| | CTTTCCCGTGTCAGAATCTCAACCCGTTTCTGTCGTCAAAAAGGCGTATCAGAAACTGTGC |
| | TACATTCATCATATCATGGGAAAGGTGCCAGACGCTTGCACTGCCTGCGATCTGGTCAAT |
| | GTGGATTTGGATGACTGCATCTTTGAACAATAAATGATTTAAATCAGGTATGGCTGCCGA |
| | TGGTTATCTTCCAGATTGGCTCGAGGACAACCTCTCTGAGGGCATTCGCGAGTGGTGGGA |
| | CTTGAAACCTGGAGCCCCGAAACCCAAAGCCAACCAGCAAAAGCAGGACGACGGCCGGG |
| | GTCTGGTGCTTCCTGGCTACAAGTACCTCGGACCCTTCAACGGACTCGACAAGGGGGAGC |
| | CCGTCAACGCGGCGGATGCAGCGGCCCTCGAGCACGACAAGGCCTACGACCAGCAGCTC |
| | AAAGCGGGTGACAATCCGTACCTGCGGTATAACCACGCCGACGCCGAGTTTCAGGAGCG |
| | TCTGCAAGAAGATACGTCTTTTGGGGGCAACCTCGGGCGAGCAGTCTTCCAGGCCAAGAA |
| | GAGGGTTCTCGAACCTTTTGGTCTGGTTGAGGAAGGTGCTAAGACGGCTCCTGGAAAGAA |
| | ACGTCCGGTAGAGCAGTCGCCACAAGAGCCAGACTCCTCCTCGGGCATTGGCAAGACAG |
| | GCCAGCAGCCCGCTAAAAAGAGACTCAATTTTGGTCAGACTGGCGACTCAGAGTCAGTCC |
| | CCGACCCACAACCTCTCGGAGAACCTCCAGCAACCCCCGCTGCTGTGGGACCTACTACAA |
| | TGGCTTCAGGCGGTGGCGCACCAATGGCAGACAATAACGAAGGCGCCGACGGAGTGGGT |
| | AATGCCTCAGGAAATTGGCATTGCGATTCCACATGGCTGGGCGACAGAGTCATCACCACC |
| | AGCACCCGAACATGGGCCTTGCCCACCTATAACAACCACCTCTACAAGCAAATCTCCAGT |
| | GCTTCAACGGGGGCCAGCAACGACAACCACTACTTCGGCTACAGCACCCCCTGGGGGTAT |
| | TTTGATTTCAACAGATTCCACTGCCATTTCTCACCACGTGACTGGCAGCGACTCATCAACA |
| | ACAATTGGGGATTCCGGCCCAAGAGACTCAACTTCAAGCTCTTCAACATCCAAGTCAAGG |
| | AGGTCACGACGAATGATGGCGTCACGACCATCGCTAATAACCTTACCAGCACGGTTCAAG |
| | TCTTCTCGGACTCGGAGTACCAGTTGCCGTACGTCCTCGGCTCTGCGCACCAGGGCTGCCT |
| | CCCTCCGTTCCCGGCGGACGTGTTCATGATTCCGCAGTACGGCTACCTAACGCTCAACAA |
| | TGGCAGCCAGGCAGTGGGACGGTCATCCTTTTACTGCCTGGAATATTTCCCATCGCAGAT |
| | GCTGAGAACGGGCAATAACTTTACCTTCAGCTACACCTTCGAGGACGTGCCTTTCCACAG |
| | CAGCTACGCGCACAGCCAGAGCCTGGACCGGCTGATGAATCCTCTCATCGACCAGTACCT |
| | GTATTACCTGAACAGAACTCAGAATCAGTCCGGAAGTGCCCAAAACAAGGACTTGCTGTT |
| | TAGCCGGGGGTCTCCAGCTGGCATGTCTGTTCAGCCCAAAAACTGGCTACCTGGACCCTG |
| | TTACCGGCAGCAGCGCGTTTCTAAAACAAAAACAGACAACAACAACAGCAACTTTACCT |
| | GGACTGGTGCTTCAAAATATAACCTTAATGGGCGTGAATCTATAATCAACCCTGGCACTG |
| | CTATGGCCTCACACAAAGACGACAAAGACAAGTTCTTTCCCATGAGCGGTGTCATGATTT |
| | TTGGAAAGGAGAGCGCCGGAGCTTCAAACACTGCATTGGACAATGTCATGATCACAGAC |
| | GAAGAGGAAATCAAAGCCACTAACCCCGTGGCCACCGAAAGATTTGGGACTGTGGCAGT |
| | CAATCTCCAGAGTGTACATCGATTGTTAATCAATAAACCGTTTAATTCGTTTCAGTTGAAC |
| | TTTGGTCTCTGCGTATTTCTTTCTTATCTAGTTTCCATGGCTACGTAGATAAGTAGCATGGC |
| | GGGTTAATCATTAACTACAAGGAACCCCTAGTGATGGAGTTGGCCACTCCCTCTCTGCGC |
| | GCTCGCTCGCTCACTGAGGCCGGGCGACCAAAGGTCGCCCGACGCCCGGGCTTTGCCCGG |
| | GCGGCCTCAGTGAGCGAGCGAGCGCGCAGAGAGGGAGTGGCCAAGCATGCAATTAACTG |
| | GCCGTCGTTTTACAACGTCGTGACTGGGAAAACCCTGGCGTTACCCAACTTAATCGCCTT |
| | GCAGCACATCCCCCTTTCGCCAGCTGTATCAGCACACAATTGCCCATTATACGCGCGTAT |
| | AATGGACTATTGTGTGCTGATA |
| TELN- | TATCAGCACACAATAGTCCATTATACGCGCGTATAATGGGCAATTGTGTGCTGATACAGC |
| SYNGDJ8- | TGGCACGACAGGTTTCCCGACTGGAAAGCGGGCAGTGAGCGCAACGCAATTAATGTGAG |
| BSRGI SEQ ID | TTAGCTCACTCATTAGGCACCCCAGGCTTTACACTTTATGCTTCCGGCTCGTATGTTGTGT |
| NO: 24 | GGAATTGTGAGCGGATAACAATTTCACACAGGAAACAGCTATGACCATGATTACGCCAG |
| | ATTTAATTAAGGCCTTAATTAGGCTAGCTTGGCCACTCCCTCTCTGCGCGCTCGCTCGCTC |
| | ACTGAGGCCGGGCGACCAAAGGTCGCCCGACGCCCGGGCTTTGCCCGGGCGGCCTCAGT |
| | GAGCGAGCGAGCGCGCAGAGAGGGAGTGGCCAACTCCATCACTAGGGGTTCCTGGAGGG |
| | GTGGAGTCGTGACGATATCCATGCGTCGACATAACGCGTTAGTATCTGCAGAGGGCCCTG |
| | CGTATGAGTGCAAGTGGGTTTTAGGACCAGGATGAGGCGGGGTGGGGGTGCCTACCTGA |
| | CGACCGACCCCGACCCACTGGACAAGCACCCAACCCCCATTCCCCAAATTGCGCATCCCC |
| | TATCAGAGAGGGGGAGGGGAAACAGGATGCGGCGAGGCGCGTGCGCACTGCCAGCTTCA |
| | GCACCGCGGACAGTGCCTTCGCCCCCGCCTGGCGGCGCGCGCCACCGCCGCCTCAGCACT |
| | GAAGGCGCGCTGACGTCACTCGCCGGTCCCCCGCAAACTCCCCTTCCCGGCCACCTTGGT |
| | CGCGTCCGCGCCGCCGCCGGCCCAGCCGGACCGCACCACGCGAGGCGCGAGATAGGGGG |
| | GCACGGGCGCGACCATCTGCGCTGCGGCGCCGGCGACTCAGCGCTGCCTCAGTCTGCGGT |
| | GGGCAGCGGAGGAGTCGTGTCGTGCCTGAGAGCGCAGCTGTGCTCCTGGGCACCGCGCA |
| | GTCCGCCCCCGCGGCTCCTGGCCAGACCACCCCTAGGACCCCCTGCCCCAAGTCGCAGCC |
| | AAGCTTCGTTTAGTGAACCGTCAGATCGCCTGGAGACGCCATCCACGCTGTTTTGACCTCC |
| | ATAGAAGACACCGGGACCGATCCAGCCTCCGCGGATTCGAATCCCGGCCGGGAACGGTG |
| | CATTGGAACGCGGATTCCCCGTGCCAAGAGTGACGTAAGTACCGCCTATAGAGTCTATAG |
| | GCCCACAAAAAATGCTTTCTTCTTTTAATATACTTTTTTGTTTATCTTATTTCTAATACTTTC |
| | CCTAATCTCTTTCTTTCAGGGCAATAATGATACAATGTATCATGCCTCTTTGCACCATTCT |
| | AAAGAATAACAGTGATAATTTCTGGGTTAAGGCAATAGCAATATTTCTGCATATAAATAT |
| | TTCTGCATATAAATTGTAACTGATGTAAGAGGTTTCATATTGCTAATAGCAGCTACAATCC |
| | AGCTACCATTCTGCTTTTATTTTATGGTTGGGATAAGGCTGGATTATTCTGAGTCCAAGCT |
| | AGGCCCTTTTGCTAATCATGTTCATACCTCTTATCTTCCTCCCACAGCTCCTGGGCAACGT |
| | GCTGGTCTGTGTGCTGGCCCATCACTTTGGCAAAGAATTGGGATTCGAACCGGTCGCCAC |
| | CGGTCACAAGCAGGAAGTCAAAGACTTTTTCCGGTGGGCAAAGGATCACGTGGTTGAGG |
| | TGGAGCATGAATTCTACGTCAAAAAGGGTGGAGCCAAGAAAAGACCCGCCCCCAGTGAC |
| | GCAGATATAAGTGAGCCCAAACGGGTGCGCGAGTCAGTTGCGCAGCCATCGACGTCAGA |
| | CGCGGAAGCTTCGATCAACTACGCGGACAGGTACCAAAACAAATGTTCTCGTCACGTGGG |
| | CATGAATCTGATGCTGTTTCCCTGCAGACAATGCGAGAGAATGAATCAGAATTCAAATAT |
| | CTGCTTCACTCACGGACAGAAAGACTGTTTAGAGTGCTTTCCCGTGTCAGAATCTCAACC |
| | CGTTTCTGTCGTCAAAAAGGCGTATCAGAAACTGTGCTACATTCATCATATCATGGGAAA |
| | GGTGCCAGACGCTTGCACTGCCTGCGATCTGGTCAATGTGGATTTGGATGACTGCATCTTT |
| | GAACAATAAATGATTTAAATCAGGTATGGCTGCCGATGGTTATCTTCCAGATTGGCTCGA |
| | GGACACTCTCTCTGAAGGAATAAGACAGTGGTGGAAGCTCAAACCTGGCCCACCACCAC |
| | CAAAGCCCGCAGAGCGGCATAAGGACGACAGCAGGGGTCTTGTGCTTCCTGGGTACAAG |
| | TACCTCGGACCCTTCAACGGACTCGACAAGGGAGAGCCGGTCAACGAGGCAGACGCCGC |
| | GGCCCTCGAGCACGACAAAGCCTACGACCGGCAGCTCGACAGCGGAGACAACCCGTACC |
| | TCAAGTACAACCACGCCGACGCCGAGTTCCAGGAGCGGCTCAAAGAAGATACGTCTTTTG |
| | GGGGCAACCTCGGGCGAGCAGTCTTCCAGGCCAAAAAGAGGCTTCTTGAACCTCTTGGTC |
| | TGGTTGAGGAAGCGGCTAAGACGGCTCCTGGAAAGAAGAGGCCTGTAGAGCACTCTCCT |
| | GTGGAGCCAGACTCCTCCTCGGGAACCGGAAAGGCGGGCCAGCAGCCTGCAAGAAAAAG |
| | ATTGAATTTTGGTCAGACTGGAGACGCAGACTCAGTCCCAGACCCTCAACCAATCGGAGA |
| | ACCTCCCGCAGCCCCCTCAGGTGTGGGATCTCTTACAATGGCTGCAGGCGGTGGCGCACC |
| | AATGGCAGACAATAACGAGGGCGCCGACGGAGTGGGTAATTCCTCGGGAAATTGGCATT |
| | GCGATTCCACATGGATGGGCGACAGAGTCATCACCACCAGCACCCGAACCTGGGCCCTGC |
| | CCACCTACAACAACCACCTCTACAAGCAAATCTCCAACAGCACATCTGGAGGATCTTCAA |
| | ATGACAACGCCTACTTCGGCTACAGCACCCCCTGGGGGTATTTTGACTTTAACAGATTCC |
| | ACTGCCACTTTTCACCACGTGACTGGCAGCGACTCATCAACAACAACTGGGGATTCCGGC |
| | CCAAGAGACTCAGCTTCAAGCTCTTCAACATCCAGGTCAAGGAGGTCACGCAGAATGAA |
| | GGCACCAAGACCATCGCCAATAACCTCACCAGCACCATCCAGGTGTTTACGGACTCGGAG |
| | TACCAGCTGCCGTACGTTCTCGGCTCTGCCCACCAGGGCTGCCTGCCTCCGTTCCCGGCGG |
| | ACGTGTTCATGATTCCCCAGTACGGCTACCTAACACTCAACAACGGTAGTCAGGCCGTGG |
| | GACGCTCCTCCTTCTACTGCCTGGAATACTTTCCTTCGCAGATGCTGAGAACCGGCAACA |
| | ACTTCCAGTTTACTTACACCTTCGAGGACGTGCCTTTCCACAGCAGCTACGCCCACAGCCA |
| | GAGCTTGGACCGGCTGATGAATCCTCTGATTGACCAGTACCTGTACTACTTGTCTCGGACT |
| | CAAACAACAGGAGGCACGACAAATACGCAGACTCTGGGCTTCAGCCAAGGTGGGCCTAA |
| | TACAATGGCCAATCAGGCAAAGAACTGGCTGCCAGGACCCTGTTACCGCCAGCAGCGAG |
| | TATCAAAGACATCTGCGGATAACAACAACAGTGAATACTCGTGGACTGGAGCTACCAAG |
| | TACCACCTCAATGGCAGAGACTCTCTGGTGAATCCGGGCCCGGCCATGGCAAGCCACAAG |
| | GACGATGAAGAAAAGTTTTTTCCTCAGAGCGGGGTTCTCATCTTTGGGAAGCAAGGCTCA |
| | GAGAAAACAAATGTGGACATTGAAAAGGTCATGATTACAGACGAAGAGGAAATCAGGAC |
| | AACCAATCCCGTGGCTACGGAGCAGTATGGTTCTGTATCTACCAACCTCCAGCAAGGTGT |
| | ACATCGATTGTTAATCAATAAACCGTTTAATTCGTTTCAGTTGAACTTTGGTCTCTGCGTA |
| | TTTCTTTCTTATCTAGTTTCCATGGCTACGTAGATAAGTAGCATGGCGGGTTAATCATTAA |
| | CTACAAGGAACCCCTAGTGATGGAGTTGGCCACTCCCTCTCTGCGCGCTCGCTCGCTCACT |
| | GAGGCCGGGCGACCAAAGGTCGCCCGACGCCCGGGCTTTGCCCGGGCGGCCTCAGTGAG |
| | CGAGCGAGCGCGCAGAGAGGGAGTGGCCAAGCATGCAATTAACTGGCCGTCGTTTTACA |
| | ACGTCGTGACTGGGAAAACCCTGGCGTTACCCAACTTAATCGCCTTGCAGCACATCCCCC |
| | TTTCGCCAGCTGTATCAGCACACAATTGCCCATTATACGCGCGTATAATGGACTATTGTGT |
| | GCTGATA |
| TELN-GFAPG- | TATCAGCACACAATAGTCCATTATACGCGCGTATAATGGGCAATTGTGTGCTGATACAGC |
| DJ8-BSRGI | TGGCACGACAGGTTTCCCGACTGGAAAGCGGGCAGTGAGCGCAACGCAATTAATGTGAG |
| SEQ ID NO: 25 | TTAGCTCACTCATTAGGCACCCCAGGCTTTACACTTTATGCTTCCGGCTCGTATGTTGTGT |
| | GGAATTGTGAGCGGATAACAATTTCACACAGGAAACAGCTATGACCATGATTACGCCAG |
| | ATTTAATTAAGGCCTTAATTAGGCTAGCTTGGCCACTCCCTCTCTGCGCGCTCGCTCGCTC |
| | ACTGAGGCCGGGCGACCAAAGGTCGCCCGACGCCCGGGCTTTGCCCGGGCGGCCTCAGT |
| | GAGCGAGCGAGCGCGCAGAGAGGGAGTGGCCAACTCCATCACTAGGGGTTCCTGGAGGG |
| | GTGGAGTCGTGACGATATCCATGCGTCGACATAACGCGTGATCTAACATATCCTGGTGTG |
| | GAGTAGCGGACGCTGCTATGACAGAGGCTCGGGGGCCTGAGCTGGCTCTGTGAGCTGGG |
| | GAGGAGGCAGACAGCCAGGCCTTGTCTGCAAGCAGACCTGGCAGCATTGGGCTGGCCGC |
| | CCCCCAGGGCCTCCTCTTCATGCCCAGTGAATGACTCACCTTGGCACAGACACAATGTTC |
| | GGGGTGGGCACAGTGCCTGCTTCCCGCCGCACCCCAGCCCCCCTCAAATGCCTTCCGAGA |
| | AGCCCATTGAGCAGGGGGCTTGCATTGCACCCCAGCCTGACAGCCTGGCATCTTGGGATA |
| | AAAGCAGCACAGCCCCCTAGGGGCTGCCCTTGCTGTGTGGCGCCACCGGCGGTGGAGAA |
| | CAAGGCTCTATTCAGCCTGTGCCCAGGAAAGGGGATCAGGGGATGCCCAGGCATGGACA |
| | GTGGGTGGCAGGGGGGGAGAGGAGGGCTGTCTGCTTCCCAGAAGTCCAAGGACACAAAT |
| | GGGTGAGGGGAGAGCTCTCCCCATAGCTGGGCTGCGGCCCAACCCCACCCCCTCAGGCTA |
| | TGCCAGGGGGTGTTGCCAGGGGCACCCGGGCATCGCCAGTCTAGCCCACTCCTTCATAAA |
| | GCCCTCGCATCCCAGGAGCGAGCAGAGCCAGAGCAGGTTGGAGAGGAGACGCATCACCT |
| | CCGCTGCTCGCGGGGATCCTCTAGAAGCTTCGTTTAGTGAACCGTCAGATCGCCTGGAGA |
| | CGCCATCCACGCTGTTTTGACCTCCATAGAAGACACCGGGACCGATCCAGCCTCCGCGGA |
| | TTCGAATCCCGGCCGGGAACGGTGCATTGGAACGCGGATTCCCCGTGCCAAGAGTGACGT |
| | AAGTACCGCCTATAGAGTCTATAGGCCCACAAAAAATGCTTTCTTCTTTTAATATACTTTT |
| | TTGTTTATCTTATTTCTAATACTTTCCCTAATCTCTTTCTTTCAGGGCAATAATGATACAAT |
| | GTATCATGCCTCTTTGCACCATTCTAAAGAATAACAGTGATAATTTCTGGGTTAAGGCAAT |
| | AGCAATATTTCTGCATATAAATATTTCTGCATATAAATTGTAACTGATGTAAGAGGTTTCA |
| | TATTGCTAATAGCAGCTACAATCCAGCTACCATTCTGCTTTTATTTTATGGTTGGGATAAG |
| | GCTGGATTATTCTGAGTCCAAGCTAGGCCCTTTTGCTAATCATGTTCATACCTCTTATCTTC |
| | CTCCCACAGCTCCTGGGCAACGTGCTGGTCTGTGTGCTGGCCCATCACTTTGGCAAAGAA |
| | TTGGGATTCGAACCGGTCGCCACCGGTCACCAAGCAGGAAGTCAAAGACTTTTTCCGGTG |
| | GGCAAAGGATCACGTGGTTGAGGTGGAGCATGAATTCTACGTCAAAAAGGGTGGAGCCA |
| | AGAAAAGACCCGCCCCCAGTGACGCAGATATAAGTGAGCCCAAACGGGTGCGCGAGTCA |
| | GTTGCGCAGCCATCGACGTCAGACGCGGAAGCTTCGATCAACTACGCGGACAGGTACCA |
| | AAACAAATGTTCTCGTCACGTGGGCATGAATCTGATGCTGTTTCCCTGCAGACAATGCGA |
| | GAGAATGAATCAGAATTCAAATATCTGCTTCACTCACGGACAGAAAGACTGTTTAGAGTG |
| | CTTTCCCGTGTCAGAATCTCAACCCGTTTCTGTCGTCAAAAAGGCGTATCAGAAACTGTGC |
| | TACATTCATCATATCATGGGAAAGGTGCCAGACGCTTGCACTGCCTGCGATCTGGTCAAT |
| | GTGGATTTGGATGACTGCATCTTTGAACAATAAATGATTTAAATCAGGTATGGCTGCCGA |
| | TGGTTATCTTCCAGATTGGCTCGAGGACACTCTCTCTGAAGGAATAAGACAGTGGTGGAA |
| | GCTCAAACCTGGCCCACCACCACCAAAGCCCGCAGAGCGGCATAAGGACGACAGCAGGG |
| | GTCTTGTGCTTCCTGGGTACAAGTACCTCGGACCCTTCAACGGACTCGACAAGGGAGAGC |
| | CGGTCAACGAGGCAGACGCCGCGGCCCTCGAGCACGACAAAGCCTACGACCGGCAGCTC |
| | GACAGCGGAGACAACCCGTACCTCAAGTACAACCACGCCGACGCCGAGTTCCAGGAGCG |
| | GCTCAAAGAAGATACGTCTTTTGGGGGCAACCTCGGGCGAGCAGTCTTCCAGGCCAAAA |
| | AGAGGCTTCTTGAACCTCTTGGTCTGGTTGAGGAAGCGGCTAAGACGGCTCCTGGAAAGA |
| | AGAGGCCTGTAGAGCACTCTCCTGTGGAGCCAGACTCCTCCTCGGGAACCGGAAAGGCG |
| | GGCCAGCAGCCTGCAAGAAAAAGATTGAATTTTGGTCAGACTGGAGACGCAGACTCAGT |
| | CCCAGACCCTCAACCAATCGGAGAACCTCCCGCAGCCCCCTCAGGTGTGGGATCTCTTAC |
| | AATGGCTGCAGGCGGTGGCGCACCAATGGCAGACAATAACGAGGGCGCCGACGGAGTGG |
| | GTAATTCCTCGGGAAATTGGCATTGCGATTCCACATGGATGGGCGACAGAGTCATCACCA |
| | CCAGCACCCGAACCTGGGCCCTGCCCACCTACAACAACCACCTCTACAAGCAAATCTCCA |
| | ACAGCACATCTGGAGGATCTTCAAATGACAACGCCTACTTCGGCTACAGCACCCCCTGGG |
| | GGTATTTTGACTTTAACAGATTCCACTGCCACTTTTCACCACGTGACTGGCAGCGACTCAT |
| | CAACAACAACTGGGGATTCCGGCCCAAGAGACTCAGCTTCAAGCTCTTCAACATCCAGGT |
| | CAAGGAGGTCACGCAGAATGAAGGCACCAAGACCATCGCCAATAACCTCACCAGCACCA |
| | TCCAGGTGTTTACGGACTCGGAGTACCAGCTGCCGTACGTTCTCGGCTCTGCCCACCAGG |
| | GCTGCCTGCCTCCGTTCCCGGCGGACGTGTTCATGATTCCCCAGTACGGCTACCTAACACT |
| | CAACAACGGTAGTCAGGCCGTGGGACGCTCCTCCTTCTACTGCCTGGAATACTTTCCTTCG |
| | CAGATGCTGAGAACCGGCAACAACTTCCAGTTTACTTACACCTTCGAGGACGTGCCTTTC |
| | CACAGCAGCTACGCCCACAGCCAGAGCTTGGACCGGCTGATGAATCCTCTGATTGACCAG |
| | TACCTGTACTACTTGTCTCGGACTCAAACAACAGGAGGCACGACAAATACGCAGACTCTG |
| | GGCTTCAGCCAAGGTGGGCCTAATACAATGGCCAATCAGGCAAAGAACTGGCTGCCAGG |
| | ACCCTGTTACCGCCAGCAGCGAGTATCAAAGACATCTGCGGATAACAACAACAGTGAAT |
| | ACTCGTGGACTGGAGCTACCAAGTACCACCTCAATGGCAGAGACTCTCTGGTGAATCCGG |
| | GCCCGGCCATGGCAAGCCACAAGGACGATGAAGAAAAGTTTTTTCCTCAGAGCGGGGTT |
| | CTCATCTTTGGGAAGCAAGGCTCAGAGAAAACAAATGTGGACATTGAAAAGGTCATGAT |
| | TACAGACGAAGAGGAAATCAGGACAACCAATCCCGTGGCTACGGAGCAGTATGGTTCTG |
| | TATCTACCAACCTCCAGCAAGGTGTACATCGATTGTTAATCAATAAACCGTTTAATTCGTT |
| | TCAGTTGAACTTTGGTCTCTGCGTATTTCTTTCTTATCTAGTTTCCATGGCTACGTAGATAA |
| | GTAGCATGGCGGGTTAATCATTAACTACAAGGAACCCCTAGTGATGGAGTTGGCCACTCC |
| | CTCTCTGCGCGCTCGCTCGCTCACTGAGGCCGGGCGACCAAAGGTCGCCCGACGCCCGGG |
| | CTTTGCCCGGGCGGCCTCAGTGAGCGAGCGAGCGCGCAGAGAGGGAGTGGCCAAGCATG |
| | CAATTAACTGGCCGTCGTTTTACAACGTCGTGACTGGGAAAACCCTGGCGTTACCCAACT |
| | TAATCGCCTTGCAGCACATCCCCCTTTCGCCAGCTGTATCAGCACACAATTGCCCATTATA |
| | CGCGCGTATAATGGACTATTGTGTGCTGATA |

### LITERATURE CITED

[0385] Berns K I, Giraud C. Biology of adeno-associated virus. Curr Top Microbiol Immunol. 1996; 218:1-23.
[0386] Chan K Y, Jang M J, Yoo B B, Greenbaum A, Ravi N, Wu W L, Sánchez-Guardado L, Lois C, Mazmanian S K, Deverman B E, Gradinaru V. Engineered AAVs for efficient noninvasive gene delivery to the central and peripheral nervous systems. Nat Neurosci. 2017 August; 20(8):1172-1179.
[0387] Heinrich J, Schultz J, Bosse M, Ziegelin G, Lanka E, Moelling K. Linear closed mini DNA generated by the prokaryotic cleaving-joining enzyme TelN is functional in mammalian cells. J Mol Med (Berl). 2002 October; 80(10):648-54.
[0388] Hordeaux J, Wang Q, Katz N, Buza E L, Bell P, Wilson J M. The Neurotropic Properties of AAV-PHP.B Are Limited to C57BL/6J Mice. Mol Ther. 2018 Mar. 7; 26(3):664-668.
[0389] Huovinen T, Brockmann E C, Akter S, Perez-Gamarra S, Yla-Pelto J, Liu Y, Lamminmäki U. Primer extension mutagenesis powered by selective rolling circle amplification. PLOS One. 2012; 7(2):e31817.
[0390] Huovinen T, Julin M, Sanmark H, Lamminmäki U. Enhanced error-prone RCA mutagenesis by concatemer resolution. Plasmid. 2011 October; 66(1):47-51.
[0391] Hutchison C A 3rd, Smith H O, Pfannkoch C, Venter J C. Cell-free cloning using phi29 DNA polymerase. Proc Natl Acad Sci USA. 2005 Nov. 29; 102(48):17332-6.
[0392] Miyazaki J, Takaki S, Araki K, Tashiro F, Tominaga A, Takatsu K, Yamamura K. Expression vector system based on the chicken beta-actin promoter directs efficient production of interleukin-5. Gene. 1989 Jul. 15; 79(2):269-77.
[0393] Mouw M B, Pintel D J. Adeno-associated virus RNAs appear in a temporal order and their splicing is stimulated during coinfection with adenovirus. J Virol. 2000 November; 74(21):9878-88.
[0394] Niwa H, Yamamura K, Miyazaki J. Efficient selection for high-expression transfectants with a novel eukaryotic vector. Gene. 1991 Dec. 15; 108(2):193-9.
[0395] Nonnenmacher M, van Bakel H, Hajjar R J, Weber T. High capsid-genome correlation facilitates creation of AAV libraries for directed evolution. Mol Ther. 2015 April; 23(4):675-82.
[0396] Picher ÁJ, Budeus B, Wafzig O, Krüger C, García-Gómez S, Martínez-Jiménez M I, Díaz-Talavera A, Weber D, Blanco L, Schneider A. TruePrime is a novel method for whole-genome amplification from single cells based on TthPrimPol. Nat Commun. 2016 Nov. 29; 7:13296.
[0397] Powell S K, Rivera-Soto R, Gray S J. Viral expression cassette elements to enhance transgene target specificity and expression in gene therapy. Discov Med. 2015 January; 19(102):49-57.
[0398] Rybchin V N, Svarchevsky A N. The plasmid prophage N15: a linear DNA with covalently closed ends. Mol Microbiol. 1999 September; 33(5):895-903.
[0399] Zolotukhin S, Byrne B J, Mason E, Zolotukhin I, Potter M, Chesnut K, Summerford C, Samulski R J, Muzyczka N. Recombinant adeno-associated virus purification using novel methods improves infectious titer and yield. Gene Ther. 1999 June; 6(6):973-85.

The application's sequence listing, which the Patent Office published only in electronic form, follows.

SEQUENCE LISTING (1185 sequences)

SEQ ID NO: 1 - DNA, 2211 bp, unidentified
  misc_feature 1..2211: note = Description of Unknown: adeno-associated virus, human clone 9
  source 1..2211: mol_type = unassigned DNA
atggctgccgatggttatcttccagattggctcgaggacaaccttagtgaaggaattcgcgagtggtgggctttgaaacctggagcccctcaacccaaggcaaatcaacaacatcaagacaacgctcgaggtcttgtgcttccgggttacaaataccttggacccggcaacggactcgacaagggggagccggtcaacgcagcagacgcggcggccctcgagcacgacaaggcctacgaccagcagctcaaggccggagacaacccgtacctcaagtacaaccacgccgacgccgagttccaggagcggctcaaagaagatacgtcttttgggggcaacctcgggcgagcagtcttccaggccaaaaagaggcttcttgaacctcttggtctggttgaggaagcggctaagacggctcctggaaagaagaggcctgtagagcagtctcctcaggaaccggactcctccgcgggtattggcaaatcgggtgcacagcccgctaaaaagagactcaatttcggtcagactggcgacacagagtcagtcccagaccctcaaccaatcggagaacctcccgcagccccctcaggtgtgggatctcttacaatggcttcaggtggtggcgcaccagtggcagacaataacgaaggtgccgatggagtgggtagttcctcgggaaattggcattgcgattcccaatggctgggggacagagtcatcaccaccagcacccgaacctgggccctgcccacctacaacaatcacctctacaagcaaatctccaacagcacatctggaggatcttcaaatgacaacgcctacttcggctacagcaccccctgggggtattttgacttcaacagattccactgccacttctcaccacgtgactggcagcgactcatcaacaacaactggggattccggcctaagcgactcaacttcaagctcttcaacattcaggtcaaagaggttacggacaacaatggagtcaagaccatcgccaataaccttaccagcacggtccaggtcttcacggactcagactatcagctcccgtacgtgctcgggtcggctcacgagggctgcctcccgccgttcccagcggacgttttcatgattcctcagtacgggtatctgacgcttaatgatggaagccaggccgtgggtcgttcgtccttttactgcctggaatatttcccgtcgcaaatgctaagaacgggtaacaacttccagttcagctacgagtttgagaacgtacctttccatagcagctacgctcacagccaaagcctggaccgactaatgaatccactcatcgaccaatacttgtactatctctcaaagactattaacggttctggacagaatcaacaaacgctaaaattcagtgtggccggacccagcaacatggctgtccagggaagaaactacatacctggacccagctaccgacaacaacgtgtctcaaccactgtgactcaaaacaacaacagcgaatttgcttggcctggagcttcttcttgggctctcaatggacgtaatagcttgatgaatcctggacctgctatggccagccacaaagaaggagaggaccgtttctttcctttgtctggatctttaatttttggcaaacaaggaactggaagagacaacgtggatgcggacaaagtcatgataaccaacgaagaagaaattaaaactactaacccggtagcaacggagtcctatggacaagtggccacaaaccaccagagtgcccaagcacaggcgcagaccggctgggttcaaaaccaaggaatacttccgggtatggtttggcaggacagagatgtgtacctgcaaggacccatttgggccaaaattcctcacacggacggcaactttcacccttctccgctgatgggagggtttggaatgaagcacccgcctcctcagatcctcatcaaaaacacacctgtacctgcggatcctccaacggccttcaacaaggacaagctgaactctttcatcacccagtattctactggccaagtcagcgtggagatcgagtgggagctgcagaaggaaaacagcaagcgctggaacccggagatccagtacacttccaactattacaagtctaataatgttgaatttgctgttaatactgaaggtgtatatagtgaaccccgccccattggcaccagatacctgactcgtaatctgtaa

SEQ ID NO: 2 - protein, 736 aa, unidentified
  REGION 1..736: note = Description of Unknown: capsid of hu.14/AAV9
MAADGYLPDWLEDNLSEGIREWWALKPGAPQPKANQQHQDNARGLVLPGYKYLGPGNGLDKGEPVNAADAAALEHDKAYDQQLKAGDNPYLKYNHADAEFQERLKEDTSFGGNLGRAVFQAKKRLLEPLGLVEEAAKTAPGKKRPVEQSPQEPDSSAGIGKSGAQPAKKRLNFGQTGDTESVPDPQPIGEPPAAPSGVGSLTMASGGGAPVADNNEGADGVGSSSGNWHCDSQWLGDRVITTSTRTWALPTYNNHLYKQISNSTSGGSSNDNAYFGYSTPWGYFDFNRFHCHFSPRDWQRLINNNWGFRPKRLNFKLFNIQVKEVTDNNGVKTIANNLTSTVQVFTDSDYQLPYVLGSAHEGCLPPFPADVFMIPQYGYLTLNDGSQAVGRSSFYCLEYFPSQMLRTGNNFQFSYEFENVPFHSSYAHSQSLDRLMNPLIDQYLYYLSKTINGSGQNQQTLKFSVAGPSNMAVQGRNYIPGPSYRQQRVSTTVTQNNNSEFAWPGASSWALNGRNSLMNPGPAMASHKEGEDRFFPLSGSLIFGKQGTGRDNVDADKVMITNEEEIKTTNPVATESYGQVATNHQSAQAQAQTGWVQNQGILPGMVWQDRDVYLQGPIWAKIPHTDGNFHPSPLMGGFGMKHPPPQILIKNTPVPADPPTAFNKDKLNSFITQYSTGQVSVEIEWELQKENSKRWNPEIQYTSNYYKSNNVEFAVNTEGVYSEPRPIGTRYLTRNL

SEQ ID NO: 3 - protein, 736 aa, synthetic construct
  REGION 1..736: note = Description of Artificial Sequence: Synthetic AAV9 Capsid Sequence
MAADGYLPDWLEDNLSEGIREWWALKPGAPQPKANQQHQDNARGLVLPGYKYLGPGNGLDKGEPVNAADAAALEHDKAYDQQLKAGDNPYLKYNHADAEFQERLKEDTSFGGNLGRAVFQAKKRLLEPLGLVEEAAKTAPGKKRPVEQSPQEPDSSAGIGKSGAQPAKKRLNFGQTGDTESVPDPQPIGEPPAAPSGVGSLTMASGGGAPVADNNEGADGVGSSSGNWHCDSQWLGDRVITTSTRTWALPTYNNHLYKQISNSTSGGSSNDNAYFGYSTPWGYFDFNRFHCHFSPRDWQRLINNNWGFRPKRLNFKLFNIQVKEVTDNNGVKTIANNLTSTVQVFTDSDYQLPYVLGSAHEGCLPPFPADVFMIPQYGYLTLNDGSQAVGRSSFYCLEYFPSQMLRTGNNFQFSYEFENVPFHSSYAHSQSLDRLMNPLIDQYLYYLSRTINGSGQNQQTLKFSVAGPSNMAVQGRNYIPGPSYRQQRVSTTVTQNNNSEFAWPGASSWALNGRNSLMNPGPAMASHKEGEDRFFPLSGSLIFGKQGTGRDNVDADKVMITNEEEIKTTNPVATESYGQVATNHQSAQAQAQTGWVQNQGILPGMVWQDRDVYLQGPIWAKIPHTDGNFHPSPLMGGFGMKHPPPQILIKNTPVPADPPTAFNKDKLNSFITQYSTGQVSVEIEWELQKENSKRWNPEIQYTSNYYKSNNVEFAVNTEGVYSEPRPIGTRYLTRNL

SEQ ID NO: 4 - DNA, 2470 bp, synthetic construct
  misc_feature 1..2470: note = Description of Artificial Sequence: Synthetic polynucleotide
  source 1..2470: mol_type = other DNA
cgcagggtctccattttgaagcgggaggtttgaacgcgcagccgccatgccggggttttacgagattgtgattaaggtccccagcgaccttgacgagcatctgcccggcatttctgacagctttgtgaactgggtggccgagaaggaatgggagttgccgccagattctgacatggatctgaatctgattgagcaggcacccctgaccgtggccgagaagctgcagcgcgactttctgacggaatggcgccgtgtgagtaaggccccggaggctcttttctttgtgcaatttgagaagggagagagctacttccacatgcacgtgctcgtggaaaccaccggggtgaaatccatggttttgggacgtttcctgagtcagattcgcgaaaaactgattcagagaatttaccgcgggatcgagccgactttgccaaactggttcgcggtcacaaagaccagaaatggcgccggaggcgggaacaaggtggtggatgagtgctacatccccaattacttgctccccaaaacccagcctgagctccagtgggcgtggactaatatggaacagtatttaagcgcctgtttgaatctcacggagcgtaaacggttggtggcgcagcatctgacgcacgtgtcgcagacgcaggagcagaacaaagagaatcagaatcccaattctgatgcgccggtgatcagatcaaaaacttcagccaggtacatggagctggtcgggtggctcgtggacaaggggattacctcggagaagcagtggatccaggaggaccaggcctcatacatctccttcaatgcggcctccaactcgcggtcccaaatcaaggctgccttggacaatgcgggaaagattatgagcctgactaaaaccgcccccgactacctggtgggccagcagcccgtggaggacatttccagcaatcggatttataaaattttggaactaaacgggtacgatccccaatatgcggcttccgtctttctgggatgggccacgaaaaagttcggcaagaggaacaccatctggctgtttgggcctgcaactaccgggaagaccaacatcgcggaggccatagcccacactgtgcccttctacgggtgcgtaaactggaccaatgagaactttcccttcaacgactgtgtcgacaagatggtgatctggtgggaggaggggaagatgaccgccaaggtcgtggagtcggccaaagccattctcggaggaagcaaggtgcgcgtggaccagaaatgcaagtcctcggcccagatagacccgactcccgtgatcgtcacctccaacaccaacatgtgcgccgtgattgacgggaactcaacgaccttcgaacaccagcagccgttgcaagaccggatgttcaaatttgaactcacccgccgtctggatcatgactttgggaaggtcaccaagcaggaagtcaaagactttttccggtgggcaaaggatcacgtggttgaggtggagcatgaattctacgtcaaaaagggtggagccaagaaaagacccgcccccagtgacgcagatataagtgagcccaaacgggtgcgcgagtcagttgcgcagccatcgacgtcagacgcggaagcttcgatcaactacgcagacaggtaccaaaacaaatgttctcgtcacgtgggcatgaatctgatgctgtttccctgcagacaatgcgagagaatgaatcagaattcaaatatctgcttcactcacggacagaaagactgtttagagtgctttcccgtgtcagaatctcaacccgtttctgtcgtcaaaaaggcgtatcagaaactgtgctacattcatcatatcatgggaaaggtgccagacgcttgcactgcctgcgatctggtcaatgtggatttggatgactgcatctttgaacaataaatgatttaaatcaggtatggctgccgatggttatcttccagattggctcgaggacactctctctgaaggaataagacagtggtggaagctcaaacctggcccaccaccaccaaagcccgcagagcggcataaggacgacagcaggggtcttgtgcttcctgggtacaagtacctcggacccttcaacggactcgacaagggagagccggtcaacgaggcagacgccgcggccctcgagcacgacaaagcctacgaccggcagctcgacagcggagacaacccgtacctcaagtacaaccacgccgacgcggagtttcaggagcgccttaaagaagatacgtcttttgggggcaacctcggacgagcagtcttccaggcgaaaaagagggttcttgaacctctgggcctggtccaccataccttcgattatccgatttgcttgttaatcaataaaccgtttaattcgtttcagttgaactttggtctctgcgtatttctttcttatctagtttccatgctctagagcggccgccaccgcggtggagctccagcttttgt

SEQ ID NO: 5 - DNA, 3681 bp, synthetic construct
  misc_feature 1..3681: note = Description of Artificial Sequence: Synthetic polynucleotide
  source 1..3681: mol_type = other DNA
ttggccactccctctctgcgcgctcgctcgctcactgaggccgggcgaccaaaggtcgcccgacgcccgggctttgcccgggcggcctcagtgagcgagcgagcgcgcagagagggagtggccaactccatcactaggggttcctggaggggtggagtcgtgacgatatcgtttaaaccgcgtcgttacataacttacggtaaatggcccgcctggctgaccgcccaacgacccccgcccattgacgtcaataatgacgtatgttcccatagtaacgccaatagggactttccattgacgtcaatgggtggagtatttacggtaaactgcccacttggcagtacatcaagtgtatcatatgccaagtacgccccctattgacgtcaatgacggtaaatggcccgcctggcattatgcccagtacatgaccttatgggactttcctacttggcagtacatctacgtattagtcatcgctattaccatggtgatgcggttttggcagtacatcaatgggcgtggatagcggtttgactcacggggatttccaagtctccaccccattgacgtcaatgggagtttgttttggcaccaaaatcaacgggactttccaaaatgtcgtaacaactccgccccattgacgcaaatgggcggtaggcgtgtacggtgggaggtctatataagcagagctcgggagcggtcaccaagcaggaagtcaaagactttttccggtgggcaaaggatcacgtggttgaggtggagcatgaattctacgtcaaaaagggtggagccaagaaaagacccgcccccagtgacgcagatataagtgagcccaaacgggtgcgcgagtcagttgcgcagccatcgacgtcagacgcggaagcttcgatcaactacgcggacaggtaccaaaacaaatgttctcgtcacgtgggcatgaatctgatgctgtttccctgcagacaatgcgagagactgaatcagaattcaaatatctgcttcactcacggtgtcaaagactgtttagagtgctttcccgtgtcagaatctcaacccgtttctgtcgtcaaaaaggcgtatcagaaactgtgctacattcatcacatcatgggaaaggtgccagacgcttgcactgcttgcgacctggtcaatgtggacttggatgactgtgtttctgaacaataaatgacttaaaccaggtatggctgccgatggttatcttccagattggctcgaggacaaccttagtgaaggaattcgcgagtggtgggctttgaaacctggagcccctcaacccaaggcaaatcaacaacatcaagacaacgctcgaggtcttgtgcttccgggttacaaataccttggacccggcaacggactcgacaagggggagccggtcaacgcagcagacgcggcggccctcgagcacgacaaggcctacgaccagcagctcaaggccggagacaacccgtacctcaagtacaaccacgccgacgccgagttccaggagcggctcaaagaagatacgtcttttgggggcaacctcgggcgagcagtcttccaggccaaaaagaggcttcttgaacctcttggtctggttgaggaagcggctaagacggctcctggaaagaagaggcctgtagagcagtctcctcaggaaccggactcctccgcgggtattggcaaatcgggtgcacagcccgctaaaaagagactcaatttcggtcagactggcgacacagagtcagtcccagaccctcaaccaatcggagaacctcccgcagccccctcaggtgtgggatctcttacaatggcttcaggtggtggcgcaccagtggcagacaataacgaaggtgccgatggagtgggtagttcctcgggaaattggcattgcgattcccaatggctgggggacagagtcatcaccaccagcacccgaacctgggccctgcccacctacaacaatcacctctacaagcaaatctccaacagcacatctggaggatcttcaaatgacaacgcctacttcggctacagcaccccctgggggtattttgacttcaacagattccactgccacttctcaccacgtgactggcagcgactcatcaacaacaactggggattccggcctaagcgactcaacttcaagctcttcaacattcaggtcaaagaggttacggacaacaatggagtcaagaccatcgccaataaccttaccagcacggtccaggtcttcacggactcagactatcagctcccgtacgtgctcgggtcggctcacgagggctgcctcccgccgttcccagcggacgttttcatgattcctcagtacgggtatctgacgcttaatgatggaagccaggccgtgggtcgttcgtccttttactgcctggaatatttcccgtcgcaaatgctaagaacgggtaacaacttccagttcagctacgagtttgagaacgtacctttccatagcagctacgctcacagccaaagcctggaccgactaatgaatccactcatcgaccaatacttgtactatctctcaaagactattaacggttctggacagaatcaacaaacgctaaaattcagtgtggccggacccagcaacatggctgtccagggaagaaactacatacctggacccagctaccgacaacaacgtgtctcaaccactgtgactcaaaacaacaacagcgaatttgcttggcctggagcttcttcttgggctctcaatggacgtaatagcttgatgaatcctggacctgctatggccagccacaaagaaggagaggaccgtttctttcctttgtctggatctttaatttttggcaaacaaggaactggaagagacaacgtggatgcggacaaagtcatgataaccaacgaagaagaaattaaaactactaacccggtagcaacggagtcctatggacaagtggccacaaaccaccagagtgcccaagcacaggcgcagaccggctgggttcaaaaccaaggaatacttccgggtatggtttggcaggacagagatgtgtacctgcaaggacccatttgggccaaaattcctcacacggacggcaactttcacccttctccgctgatgggagggtttggaatgaagcacccgcctcctcagatcctcatcaaaaacacacctgtacctgcggatcctccaacggccttcaacaaggacaagctgaactctttcatcacccagtattctactggccaagtcagcgtggagatcgagtgggagctgcagaaggaaaacagcaagcgctggaacccggagatccagtacacttccaactattacaagtctaataatgttgaatttgctgttaatactgaaggtgtatatagtgaaccccgccccattggcaccagatacctgactcgtaatctgtaatcgattgttaatcaataaaccgtttaattcgtttcagttgaactttggtctctgcgtatttctttcttatctagtttccatggctacgtagataagtagcatggcgggttaatcattaactacaaggaacccctagtgatggagttggccactccctctctgcgcgctcgctcgctcactgaggccgggcgaccaaaggtcgcccgacgcccgggctttgcccgggcggcctcagtgagcgagcgagcgcgcagagagggagtggccaa

SEQ ID NO: 6 - DNA, 3755 bp, synthetic construct
  misc_feature 1..3755: note = Description of Artificial Sequence: Synthetic polynucleotide
  source 1..3755: mol_type = other DNA
gtcgacggtatcgggggagctcgcagggtctccattttgaagcgggaggtttgaacgcgcagccgccatgccggggttttacgagattgtgattaaggtccccagcgaccttgacgagcatctgcccggcatttctgacagctttgtgaactgggtggccgagaaggaatgggagttgccgccagattctgacatggatctgaatctgattgagcaggcacccctgaccgtggccgagaagctgcagcgcgactttctgacggaatggcgccgtgtgagtaaggccccggaggctcttttctttgtgcaatttgagaagggagagagctacttccacatgcacgtgctcgtggaaaccaccggggtgaaatccatggttttgggacgtttcctgagtcagattcgcgaaaaactgattcagagaatttaccgcgggatcgagccgactttgccaaactggttcgcggtcacaaagaccagaaatggcgccggaggcgggaacaaggtggtggatgagtgctacatccccaattacttgctccccaaaacccagcctgagctccagtgggcgtggactaatatggaacagtatttaagcgcctgtttgaatctcacggagcgtaaacggttggtggcgcagcatctgacgcacgtgtcgcagacgcaggagcagaacaaagagaatcagaatcccaattctgatgcgccggtgatcagatcaaaaacttcagccaggtacatggagctggtcgggtggctcgtggacaaggggattacctcggagaagcagtggatccaggaggaccaggcctcatacatctccttcaatgcggcctccaactcgcggtcccaaatcaaggctgccttggacaatgcgggaaagattatgagcctgactaaaaccgcccccgactacctggtgggccagcagcccgtggaggacatttccagcaatcggatttataaaattttggaactaaacgggtacgatccccaatatgcggcttccgtctttctgggatgggccacgaaaaagttcggcaagaggaacaccatctggctgtttgggcctgcaactaccgggaagaccaacatcgcggaggccatagcccacactgtgcccttctacgggtgcgtaaactggaccaatgagaactttcccttcaacgactgtgtcgacaagatggtgatctggtgggaggaggggaagatgaccgccaaggtcgtggagtcggccaaagccattctcggaggaagcaaggtgcgcgtggaccagaaatgcaagtcctcggcccagatagacccgactcccgtgatcgtcacctccaacaccaacatgtgcgccgtgattgacgggaactcaacgaccttcgaacaccagcagccgttgcaagaccggatgttcaaatttgaactcacccgccgtctggatcatgactttgggaaggtcaccaagcaggaagtcaaagactttttccggtgggcaaaggatcacgtggttgaggtggagcatgaattctacgtcaaaaagggtggagccaagaaaagacccgcccccagtgacgcagatataagtgagcccaaacgggtgcgcgagtcagttgcgcagccatcgacgtcagacgcggaagcttcgatcaactacgcggacaggtaccaaaacaaatgttctcgtcacgtgggcatgaatctgatgctgtttccctgcagacaatgcgagagactgaatcagaattcaaatatctgcttcactcacggtgtcaaagactgtttagagtgctttcccgtgtcagaatctcaacccgtttctgtcgtcaaaaaggcgtatcagaaactgtgctacattcatcacatcatgggaaaggtgccagacgcttgcactgcttgcgacctggtcaatgtggacttggatgactgtgtttctgaacaataaatgacttaaaccaggtatggctgccgatggttatcttccagattggctcgaggacaaccttagtgaaggaattcgcgagtggtgggctttgaaacctggagcccctcaacccaaggcaaatcaacaacatcaagacaacgctcgaggtcttgtgcttccgggttacaaataccttggacccggcaacggactcgacaagggggagccggtcaacgcagcagacgcggcggccctcgagcacgacaaggcctacgaccagcagctcaaggccggagacaacccgtacctcaagtacaaccacgccgacgccgagttccaggagcggctcaaagaagatacgtcttttgggggcaacctcgggcgagcagtcttccaggccaaaaagaggcttcttgaacctcttggtctggttgaggaagcggctaagacggctcctggaaagaagaggcctgtagagcagtctcctcaggaaccggactcctccgcgggtattggcaaatcgggtgcacagcccgctaaaaagagactcaatttcggtcagactggcgacacagagtcagtcccagaccctcaaccaatcggagaacctcccgcagccccctcaggtgtgggatctcttacaatggcttcaggtggtggcgcaccagtggcagacaataacgaaggtgccgatggagtgggtagttcctcgggaaattggcattgcgattcccaatggctgggggacagagtcatcaccaccagcacccgaacctgggccctgcccacctacaacaatcacctctacaagcaaatctccaacagcacatctggaggatcttcaaatgacaacgcctacttcggctacagcaccccctgggggtattttgacttcaacagattccactgccacttctcaccacgtgactggcagcgactcatcaacaacaactggggattccggcctaagcgactcaacttcaagctcttcaacattcaggtcaaagaggttacggacaacaatggagtcaagaccatcgccaataaccttaccagcacggtccaggtcttcacggactcagactatcagctcccgtacgtgctcgggtcggctcacgagggctgcctcccgccgttcccagcggacgttttcatgattcctcagtacgggtatctgacgcttaatgatggaagccaggccgtgggtcgttcgtccttttactgcctggaatatttcccgtcgcaaatgctaagaacgggtaacaacttccagttcagctacgagtttgagaacgtacctttccatagcagctacgctcacagccaaagcctggaccgactaatgaatccactcatcgaccaatacttgtactatctctcaaagactattaacggttctggacagaatcaacaaacgctaaaattcagtgtggccggacccagcaacatggctgtccagggaagaaactacatacctggacccagctaccgacaacaacgtgtctcaaccactgtgactcaaaacaacaacagcgaatttgcttggcctggagcttcttcttgggctctcaatggacgtaatagcttgatgaatcctggacctgctatggccaagtcagcgtggagatcgagtgggagctgcagaaggaaaacagcaagcgctggaacccggagatccagtacacttccaactattacaagtctaataatgttgaatttgctgttaatactgaaggtgtatatagtgaaccccgccccattggcaccagatacctgactcgtaatctgtaattgcttgttaatcaataaaccgtttaattcgtttcagttgaactttggtctc

SEQ ID NO: 7 - DNA, 3755 bp, synthetic construct
  misc_feature 1..3755: note = Description of Artificial Sequence: Synthetic polynucleotide
  source 1..3755: mol_type = other DNA
gtcgacggtatcgggggagctcgcagggtctccattttgaagcgggaggtttgaacgcgcagccgccatgccggggttttacgagattgtgattaaggtccccagcgaccttgacgagcatctgcccggcatttctgacagctttgtgaactgggtggccgagaaggaatgggagttgccgccagattctgacatggatctgaatctgattgagcaggcacccctgaccgtggccgagaagctgcagcgcgactttctgacggaatggcgccgtgtgagtaaggccccggaggctcttttctttgtgcaatttgagaagggagagagctacttccacatgcacgtgctcgtggaaaccaccggggtgaaatccatggttttgggacgtttcctgagtcagattcgcgaaaaactgattcagagaatttaccgcgggatcgagccgactttgccaaactggttcgcggtcacaaagaccagaaatggcgccggaggcgggaacaaggtggtggatgagtgctacatccccaattacttgctccccaaaacccagcctgagctccagtgggcgtggactaatatggaacagtatttaagcgcctgtttgaatctcacggagcgtaaacggttggtggcgcagcatctgacgcacgtgtcgcagacgcaggagcagaacaaagagaatcagaatcccaattctgatgcgccggtgatcagatcaaaaacttcagccaggtacatggagctggtcgggtggctcgtggacaaggggattacctcggagaagcagtggatccaggaggaccaggcctcatacatctccttcaatgcggcctccaactcgcggtcccaaatcaaggctgccttggacaatgcgggaaagattatgagcctgactaaaaccgcccccgactacctggtgggccagcagcccgtggaggacatttccagcaatcggatttataaaattttggaactaaacgggtacgatccccaatatgcggcttccgtctttctgggatgggccacgaaaaagttcggcaagaggaacaccatctggctgtttgggcctgcaactaccgggaagaccaacatcgcggaggccatagcccacactgtgcccttctacgggtgcgtaaactggaccaatgagaactttcccttcaacgactgtgtcgacaagatggtgatctggtgggaggaggggaagatgaccgccaaggtcgtggagtcggccaaagccattctcggaggaagcaaggtgcgcgtggaccagaaatgcaagtcctcggcccagatagacccgactcccgtgatcgtcacctccaacaccaacatgtgcgccgtgattgacgggaactcaacgaccttcgaacaccagcagccgttgcaagaccggatgttcaaatttgaactcacccgccgtctggatcatgactttgggaaggtcaccaagcaggaagtcaaagactttttccggtgggcaaaggatcacgtggttgaggtggagcatgaattctacgtcaaaaagggtggagccaagaaaagacccgcccccagtgacgcagatataagtgagcccaaacgggtgcgcgagtcagttgcgcagccatcgacgtcagacgcggaagcttcgatcaactacgcggacaggtaccaaaacaaatgttctcgtcacgtgggcatgaatctgatgctgtttccctgcagacaatgcgagagactgaatcagaattcaaatatctgcttcactcacggtgtcaaagactgtttagagtgctttcccgtgtcagaatctcaacccgtttctgtcgtcaaaaaggcgtatcagaaactgtgctacattcatcacatcatgggaaaggtgccagacgcttgcactgcttgcgacctggtcaatgtggacttggatgactgtgtttctgaacaataaatgacttaaaccaggtatggctgccgatggttagcttccagattggctcgaggacaaccttagtgaaggaattcgcgagtggtgggctttgaaacctggagcccctcaacccaaggcaaatcaacaacatcaagacaacgctcgaggtcttgtgcttccgggttacaaataccttggacccggcaacggactcgacaagggggagccggtcaacgcagcagacgcggcggccctcgagcacgacaaggcctacgaccagcagctcaaggccggagacaacccgtacctcaagtacaaccacgccgacgccgagttccaggagcggctcaaagaagatacgtcttttgggggcaacctcgggcgagcagtcttccaggccaaaaagaggcttcttgaacctcttggtctggttgaggaagcggctaagacggctcctggaaagtagaggcctgtagagcagtctcctcaggaaccggactcctccgcgggtattggcaaatcgggtgcacagcccgctaaaaagagactcaatttcggtcagactggcgacacagagtcagtcccagaccctcaaccaatcggagaacctcccgcagccccctcaggtgtgggatctcttacaatggcttcaggtggtggcgcaccagtggcagacaataactaaggtgccgatggagtgggtagttcctcgggaaattggcattgcgattcccaatggctgggggacagagtcatcaccaccagcacccgaacctgggccctgcccacctacaacaatcacctctacaagcaaatctccaacagcacatctggaggatcttcaaatgacaacgcctacttcggctacagcaccccctgggggtattttgacttcaacagattccactgccacttctcaccacgtgactggcagcgactcatcaacaacaactggggattccggcctaagcgactcaacttcaagctcttcaacattcaggtcaaagaggttacggacaacaatggagtcaagaccatcgccaataaccttaccagcacggtccaggtcttcacggactcagactatcagctcccgtacgtgctcgggtcggctcacgagggctgcctcccgccgttcccagcggacgttttcatgattcctcagtacgggtatctgacgcttaatgatggaagccaggccgtgggtcgttcgtccttttactgcctggaatatttcccgtcgcaaatgctaagaacgggtaacaacttccagttcagctacgagtttgagaacgtacctttccatagcagctacgctcacagccaaagcctggaccgactaatgaatccactcatcgaccaatacttgtactatctctcaaagactattaacggttctggacagaatcaacaaacgctaaaattcagtgtggccggacccagcaacatggctgtccagggaagaaactacatacctggacccagctaccgacaacaacgtgtctcaaccactgtgactcaaaacaacaacagcgaatttgcttggcctggagcttcttcttgggctctcaatggacgtaatagcttgatgaatcctggacctgctatggccaagtcagcgtggagatcgagtgggagctgcagaaggaaaacagcaagcgctggaacccggagatccagtacacttccaactattacaagtctaataatgttgaatttgctgttaatactgaaggtgtatatagtgaaccccgccccattggcaccagatacctgactcgtaatctgtaattgcttgttaatcaataaaccgtttaattcgtttcagttgaactttggtctc

SEQ ID NO: 8 - DNA, 3710 bp, synthetic construct
  misc_feature 1..3710: note = Description of Artificial Sequence: Synthetic polynucleotide
  source 1..3710: mol_type = other DNA
ttggccactccctctctgcgcgctcgctcgctcactgaggccgggcgaccaaaggtcgcccgacgcccgggctttgcccgggcggcctcagtgagcgagcgagcgcgcagagagggagtggccaactccatcactaggggttcctggaggggtggagtcgtgacgatatctagtatctgcagagggccctgcgtatgagtgcaagtgggttttaggaccaggatgaggcggggtgggggtgcctacctgacgaccgaccccgacccactggacaagcacccaacccccattccccaaattgcgcatcccctatcagagagggggaggggaaacaggatgcggcgaggcgcgtgcgcactgccagcttcagcaccgcggacagtgccttcgcccccgcctggcggcgcgcgccaccgccgcctcagcactgaaggcgcgctgacgtcactcgccggtcccccgcaaactccccttcccggccaccttggtcgcgtccgcgccgccgccggcccagccggaccgcaccacgcgaggcgcgagataggggggcacgggcgcgaccatctgcgctgcggcgccggcgactcagcgctgcctcagtctgcggtgggcagcggaggagtcgtgtcgtgcctgagagcgcagctgtgctcctgggcaccgcgcagtccgcccccgcggctcctggccagaccacccctaggaccccctgccccaagtcgcagccggtcaccaagcaggaagtcaaagactttttccggtgggcaaaggatcacgtggttgaggtggagcatgaattctacgtcaaaaagggtggagccaagaaaagacccgcccccagtgacgcagatataagtgagcccaaacgggtgcgcgagtcagttgcgcagccatcgacgtcagacgcggaagcttcgatcaactacgcggacaggtaccaaaacaaatgttctcgtcacgtgggcatgaatctgatgctgtttccctgcagacaatgcgagagactgaatcagaattcaaatatctgcttcactcacggtgtcaaagactgtttagagtgctttcccgtgtcagaatctcaacccgtttctgtcgtcaaaaaggcgtatcagaaactgtgctacattcatcacatcatgggaaaggtgccagacgcttgcactgcttgcgacctggtcaatgtggacttggatgactgtgtttctgaacaataaatgacttaaaccaggtatggctgccgatggttatcttccagattggctcgaggacaaccttagtgaaggaattcgcgagtggtgggctttgaaacctggagcccctcaacccaaggcaaatcaacaacatcaagacaacgctcgaggtcttgtgcttccgggttacaaataccttggacccggcaacggactcgacaagggggagccggtcaacgcagcagacgcggcggccctcgagcacgacaaggcctacgaccagcagctcaaggccggagacaacccgtacctcaagtacaaccacgccgacgccgagttccaggagcggctcaaagaagatacgtcttttgggggcaacctcgggcgagcagtcttccaggccaaaaagaggcttcttgaacctcttggtctggttgaggaagcggctaagacggctcctggaaagaagaggcctgtagagcagtctcctcaggaaccggactcctccgcgggtattggcaaatcgggtgcacagcccgctaaaaagagactcaatttcggtcagactggcgacacagagtcagtcccagaccctcaaccaatcggagaacctcccgcagccccctcaggtgtgggatctcttacaatggcttcaggtggtggcgcaccagtggcagacaataacgaaggtgccgatggagtgggtagttcctcgggaaattggcattgcgattcccaatggctgggggacagagtcatcaccaccagcacccgaacctgggccctgcccacctacaacaatcacctctacaagcaaatctccaacagcacatctggaggatcttcaaatgacaacgcctacttcggctacagcaccccctgggggtattttgacttcaacagattccactgccacttctcaccacgtgactggcagcgactcatcaacaacaactggggattccggcctaagcgactcaacttcaagctcttcaacattcaggtcaaagaggttacggacaacaatggagtcaagaccatcgccaataaccttaccagcacggtccaggtcttcacggactcagactatcagctcccgtacgtgctcgggtcggctcacgagggctgcctcccgccgttcccagcggacgttttcatgattcctcagtacgggtatctgacgcttaatgatggaagccaggccgtgggtcgttcgtccttttactgcctggaatatttcccgtcgcaaatgctaagaacgggtaacaacttccagttcagctacgagtttgagaacgtacctttccatagcagctacgctcacagccaaagcctggaccgactaatgaatccactcatcgaccaatacttgtactatctctcaaagactattaacggttctggacagaatcaacaaacgctaaaattcagtgtggccggacccagcaacatggctgtccagggaagaaactacatacctggacccagctaccgacaacaacgtgtctcaaccactgtgactcaaaacaacaacagcgaatttgcttggcctggagcttcttcttgggctctcaatggacgtaatagcttgatgaatcctggacctgctatggccagccacaaagaaggagaggaccgtttctttcctttgtctggatctttaatttttggcaaacaaggaactggaagagacaacgtggatgcggacaaagtcatgataaccaacgaagaagaaattaaaactactaacccggtagcaacggagtcctatggacaagtggccacaaaccaccagagtgcccaagcacaggcgcagaccggctgggttcaaaaccaaggaatacttccgggtatggtttggcaggacagagatgtgtacctgcaaggacccatttgggccaaaattcctcacacggacggcaactttcacccttctccgctgatgggagggtttggaatgaagcacccgcctcctcagatcctcatcaaaaacacacctgtacctgcggatcctccaacggccttcaacaaggacaagctgaactctttcatcacccagtattctactggccaagtcagcgtggagatcgagtgggagctgcagaaggaaaacagcaagcgctggaacccggagatccagtacacttccaactattacaagtctaataatgttgaatttgctgttaatactgaaggtgtatatagtgaaccccgccccattggcaccagatacctgactcgtaatctgtaatcgattgttaatcaataaaccgtttaattcgtttcagttgaactttggtctctgcgtatttctttcttatctagtttccatggctacgtagataagtagcatggcgggttaatcattaactacaaggaacccctagtgatggagttggccactccctctctgcgcgctcgctcgctcactgaggccgggcgaccaaaggtcgcccgacgcccgggctttgcccgggcggcctcagtgagcgagcgagcgcgcagagagggagtggccaa

SEQ ID NO: 9 - DNA, 3852 bp, synthetic construct
  misc_feature 1..3852: note = Description of Artificial Sequence: Synthetic polynucleotide
  source 1..3852: mol_type = other DNA
ttggccactccctctctgcgcgctcgctcgctcactgaggccgggcgaccaaaggtcgcccgacgcccgggctttgcccgggcggcctcagtgagcgagcgagcgcgcagagagggagtggccaactccatcactaggggttcctggaggggtggagtcgtgacgatatcgatctaacatatcctggtgtggagtagcggacgctgctatgacagaggctcgggggcctgagctggctctgtgagctggggaggaggcagacagccaggccttgtctgcaagcagacctggcagcattgggctggccgccccccagggcctcctcttcatgcccagtgaatgactcaccttggcacagacacaatgttcggggtgggcacagtgcctgcttcccgccgcaccccagcccccctcaaatgccttccgagaagcccattgagcagggggcttgcattgcaccccagcctgacagcctggcatcttgggataaaagcagcacagccccctaggggctgcccttgctgtgtggcgccaccggcggtggagaacaaggctctattcagcctgtgcccaggaaaggggatcaggggatgcccaggcatggacagtgggtggcagggggggagaggagggctgtctgcttcccagaagtccaaggacacaaatgggtgaggggagagctctccccatagctgggctgcggcccaaccccaccccctcaggctatgccagggggtgttgccaggggcacccgggcatcgccagtctagcccactccttcataaagccctcgcatcccaggagcgagcagagccagagcaggttggagaggagacgcatcacctccgctgctcgcggggatcctctagggtcaccaagcaggaagtcaaagactttttccggtgggcaaaggatcacgtggttgaggtggagcatgaattctacgtcaaaaagggtggagccaagaaaagacccgcccccagtgacgcagatataagtgagcccaaacgggtgcgcgagtcagttgcgcagccatcgacgtcagacgcggaagcttcgatcaactacgcggacaggtaccaaaacaaatgttctcgtcacgtgggcatgaatctgatgctgtttccctgcagacaatgcgagagactgaatcagaattcaaatatctgcttcactcacggtgtcaaagactgtttagagtgctttcccgtgtcagaatctcaacccgtttctgtcgtcaaaaaggcgtatcagaaactgtgctacattcatcacatcatgggaaaggtgccagacgcttgcactgcttgcgacctggtcaatgtggacttggatgactgtgtttctgaacaataaatgacttaaaccaggtatggctgccgatggttatcttccagattggctcgaggacaaccttagtgaaggaattcgcgagtggtgggctttgaaacctggagcccctcaacccaaggcaaatcaacaacatcaagacaacgctcgaggtcttgtgcttccgggttacaaataccttggacccggcaacggactcgacaagggggagccggtcaacgcagcagacgcggcggccctcgagcacgacaaggcctacgaccagcagctcaaggccggagacaacccgtacctcaagtacaaccacgccgacgccgagttccaggagcggctcaaagaagatacgtcttttgggggcaacctcgggcgagcagtcttccaggccaaaaagaggcttcttgaacctcttggtctggttgaggaagcggctaagacggctcctggaaagaagaggcctgtagagcagtctcctcaggaaccggactcctccgcgggtattggcaaatcgggtgcacagcccgctaaaaagagactcaatttcggtcagactggcgacacagagtcagtcccagaccctcaaccaatcggagaacctcccgcagccccctcaggtgtgggatctcttacaatggcttcaggtggtggcgcaccagtggcagacaataacgaaggtgccgatggagtgggtagttcctcgggaaattggcattgcgattcccaatggctgggggacagagtcatcaccaccagcacccgaacctgggccctgcccacctacaacaatcacctctacaagcaaatctccaacagcacatctggaggatcttcaaatgacaacgcctacttcggctacagcaccccctgggggtattttgacttcaacagattccactgccacttctcaccacgtgactggcagcgactcatcaacaacaactggggattccggcctaagcgactcaacttcaagctcttcaacattcaggtcaaagaggttacggacaacaatggagtcaagaccatcgccaataaccttaccagcacggtccaggtcttcacggactcagactatcagctcccgtacgtgctcgggtcggctcacgagggctgcctcccgccgttcccagcggacgttttcatgattcctcagtacgggtatctgacgcttaatgatggaagccaggccgtgggtcgttcgtccttttactgcctggaatatttcccgtcgcaaatgctaagaacgggtaacaacttccagttcagctacgagtttgagaacgtacctttccatagcagctacgctcacagccaaagcctggaccgactaatgaatccactcatcgaccaatacttgtactatctctcaaagactattaacggttctggacagaatcaacaaacgctaaaattcagtgtggccggacccagcaacatggctgtccagggaagaaactacatacctggacccagctaccgacaacaacgtgtctcaaccactgtgactcaaaacaacaacagcgaatttgcttggcctggagcttcttcttgggctctcaatggacgtaatagcttgatgaatcctggacctgctatggccagccacaaagaaggagaggaccgtttctttcctttgtctggatctttaatttttggcaaacaaggaactggaagagacaacgtggatgcggacaaagtcatgataaccaacgaagaagaaattaaaactactaacccggtagcaacggagtcctatggacaagtggccacaaaccaccagagtgcccaagcacaggcgcagaccggctgggttcaaaaccaaggaatacttccgggtatggtttggcaggacagagatgtgtacctgcaaggacccatttgggccaaaattcctcacacggacggcaactttcacccttctccgctgatgggagggtttggaatgaagcacccgcctcctcagatcctcatcaaaaacacacctgtacctgcggatcctccaacggccttcaacaaggacaagctgaactctttcatcacccagtattctactggccaagtcagcgtggagatcgagtgggagctgcagaaggaaaacagcaagcgctggaacccggagatccagtacacttccaactattacaagtctaataatgttgaatttgctgttaatactgaaggtgtatatagtgaaccccgccccattggcaccagatacctgactcgtaatctgtaatcgattgttaatcaataaaccgtttaattcgtttcagttgaactttggtctctgcgtatttctttcttatctagtttccatggctacgtagataagtagcatggcgggttaatcattaactacaaggaacccctagtgatggagttggccactccctctctgcgcgctcgctcgctcactgaggccgggcgaccaaaggtcgcccgacgcccgggctttgcccgggcggcctcagtgagcgagcgagcgcgcagagagggagtggccaa

SEQ ID NO: 10 - DNA, 4425 bp, synthetic construct
  misc_feature 1..4425: note = Description of Artificial Sequence: Synthetic polynucleotide
  source 1..4425: mol_type = other DNA
ttggccactccctctctgcgcgctcgctcgctcactgaggccgggcgaccaaaggtcgcccgacgcccgggctttgcccgggcggcctcagtgagcgagcgagcgcgcagagagggagtggccaactccatcactaggggttcctggaggggtggagtcgtgacgatatccatgcgtcgacataacgcgtcgacattgattattgactagttattaatagtaatcaattacggggtcattagttcatagcccatatatggagttccgcgttacataacttacggtaaatggcccgcctggctgaccgcccaacgacccccgcccattgacgtcaataatgacgtatgttcccatagtaacgccaatagggactttccattgacgtcaatgggtggagtatttacggtaaactgcccacttggcagtacatcaagtgtatcatatgccaagtacgccccctattgacgtcaatgacggtaaatggcccgcctggcattatgcccagtacatgaccttatgggactttcctacttggcagtacatctacgtattagtcatcgctattaccatgtcgaggccacgttctgcttcactctccccatctcccccccctccccacccccaattttgtatttatttattttttaattattttgtgcagcgatgggggcggggggggggggcgcgcgccaggcggggcggggcggggcgaggggcggggcggggcgaggcggagaggtgcggcggcagccaatcagagcggcgcgctccgaaagtttccttttatggcgaggcggcggcggcggcggccctataaaaagcgaagcgcgcggcgggcgggagcaagcttcgtttagtgaaccgtcagatcgcctggagacgccatccacgctgttttgacctccatagaagacaccgggaccgatccagcctccgcggattcgaatcccggccgggaacggtgcattggaacgcggattccccgtgccaagagtgacgtaagtaccgcctatagagtctataggcccacaaaaaatgctttcttcttttaatatacttttttgtttatcttatttctaatactttccctaatctctttctttcagggcaataatgatacaatgtatcatgcctctttgcaccattctaaagaataacagtgataatttctgggttaaggcaatagcaatatttctgcatataaatatttctgcatataaattgtaactgatgtaagaggtttcatattgctaatagcagctacaatccagctaccattctgcttttattttatggttgggataaggctggattattctgagtccaagctaggcccttttgctaatcatgttcatacctcttatcttcctcccacagctcctgggcaacgtgctggtctgtgtgctggcccatcactttggcaaagaattgggattcgaaccggtcaccaagcaggaagtcaaagactttttccggtgggcaaaggatcacgtggttgaggtggagcatgaattctacgtcaaaaagggtggagccaagaaaagacccgcccccagtgacgcagatataagtgagcccaaacgggtgcgcgagtcagttgcgcagccatcgacgtcagacgcggaagcttcgatcaactacgcggacaggtaccaaaacaaatgttctcgtcacgtgggcatgaatctgatgctgtttccctgcagacaatgcgagagactgaatcagaattcaaatatctgcttcactcacggtgtcaaagactgtttagagtgctttcccgtgtcagaatctcaacccgtttctgtcgtcaaaaaggcgtatcagaaactgtgctacattcatcacatcatgggaaaggtgccagacgcttgcactgcttgcgacctggtcaatgtggacttggatgactgtgtttctgaacaataaatgacttaaaccaggtatggctgccgatggttatcttccagattggctcgaggacaaccttagtgaaggaattcgcgagtggtgggctttgaaacctggagcccctcaacccaaggcaaatcaacaacatcaagacaacgctcgaggtcttgtgcttccgggttacaaataccttggacccggcaacggactcgacaagggggagccggtcaacgcagcagacgcggcggccctcgagcacgacaaggcctacgaccagcagctcaaggccggagacaacccgtacctcaagtacaaccacgccgacgccgagttccaggagcggctcaaagaagatacgtcttttgggggcaacctcgggcgagcagtcttccaggccaaaaagaggcttcttgaacctcttggtctggttgaggaagcggctaagacggctcctggaaagaagaggcctgtagagcagtctcctcaggaaccggactcctccgcgggtattggcaaatcgggtgcacagcccgctaaaaagagactcaatttcggtcagactggcgacacagagtcagtcccagaccctcaaccaatcggagaacctcccgcagccccctcaggtgtgggatctcttacaatggcttcaggtggtggcgcaccagtggcagacaataacgaaggtgccgatggagtgggtagttcctcgggaaattggcattgcgattcccaatggctgggggacagagtcatcaccaccagcacccgaacctgggccctgcccacctacaacaatcacctctacaagcaaatctccaacagcacatctggaggatcttcaaatgacaacgcctacttcggctacagcaccccctgggggtattttgacttcaacagattccactgccacttctcaccacgtgactggcagcgactcatcaacaacaactggggattccggcctaagcgactcaacttcaagctcttcaacattcaggtcaaagaggttacggacaacaatggagtcaagaccatcgccaataaccttaccagcacggtccaggtcttcacggactcagactatcagctcccgtacgtgctcgggtcggctcacgagggctgcctcccgccgttcccagcggacgttttcatgattcctcagtacgggtatctgacgcttaatgatggaagccaggccgtgggtcgttcgtccttttactgcctggaatatttcccgtcgcaaatgctaagaacgggtaacaacttccagttcagctacgagtttgagaacgtacctttccatagcagctacgctcacagccaaagcctggaccgactaatgaatccactcatcgaccaatacttgtactatctctcaaagactattaacggttctggacagaatcaacaaacgctaaaattcagtgtggccggacccagcaacatggctgtccagggaagaaactacatacctggacccagctaccgacaacaacgtgtctcaaccactgtgactcaaaacaacaacagcgaatttgcttggcctggagcttcttcttgggctctcaatggacgtaatagcttgatgaatcctggacctgctatggccagccacaaagaaggagaggaccgtttctttcctttgtctggatctttaatttttggcaaacaaggaactggaagagacaacgtggatgcggacaaagtcatgataaccaacgaagaagaaattaaaactactaacccggtagcaacggagtcctatggacaagtggccacaaaccaccagagtgcccaagcacaggcgcagaccggctgggttcaaaaccaaggaatacttccgggtatggtttggcaggacagagatgtgtacctgcaaggacccatttgggccaaaattcctcacacggacggcaactttcacccttctccgctgatgggagggtttggaatgaagcacccgcctcctcagatcctcatcaaaaacacacctgtacctgcggatcctccaacggccttcaacaaggacaagctgaactctttcatcacccagtattctactggccaagtcagcgtggagatcgagtgggagctgcagaaggaaaacagcaagcgctggaacccggagatccagtacacttccaactattacaagtctaataatgttgaatttgctgttaatactgaaggtgtatatagtgaaccccgccccattggcaccagatacctgactcgtaatctgtaatcgattgttaatcaataaaccgtttaattcgtttcagttgaactttggtctctgcgtatttctttcttatctagtttccatggctacgtagataagtagcatggcgggttaatcattaactacaaggaacccctagtgatggagttggccactccctctctgcgcgctcgctcgctcactgaggccgggcgaccaaaggtcgcccgacgcccgggctttgcccgggcggcctcagtgagcgagcgagcgcgcagagagggagtggccaa

SEQ ID NO: 11 - DNA, 4480 bp, synthetic construct
  misc_feature 1..4480: note = Description of Artificial Sequence: Synthetic polynucleotide
  source 1..4480: mol_type = other DNA
ttggccactccctctctgcgcgctcgctcgctcactgaggccgggcgaccaaaggtcgcccgacgcccgggctttgcccgggcggcctcagtgagcgagcgagcgcgcagagagggagtggccaactccatcactaggggttcctggaggggtggagtcgtgacgatatccatgcgtcgacataacgcgtgatctaacatatcctggtgtggagtagcggacgctgctatgacagaggctcgggggcctgagctggctctgtgagctggggaggaggcagacagccaggccttgtctgcaagcagacctggcagcattgggctggccgccccccagggcctcctcttcatgcccagtgaatgactcaccttggcacagacacaatgttcggggtgggcacagtgcctgcttcccgccgcaccccagcccccctcaaatgccttccgagaagcccattgagcagggggcttgcattgcaccccagcctgacagcctggcatcttgggataaaagcagcacagccccctaggggctgcccttgctgtgtggcgccaccggcggtggagaacaaggctctattcagcctgtgcccaggaaaggggatcaggggatgcccaggcatggacagtgggtggcagggggggagaggagggctgtctgcttcccagaagtccaaggacacaaatgggtgaggggagagctctccccatagctgggctgcggcccaaccccaccccctcaggctatgccagggggtgttgccaggggcacccgggcatcgccagtctagcccactccttcataaagccctcgcatcccaggagcgagcagagccagagcaggttggagaggagacgcatcacctccgctgctcgcggggatcctctagaagcttcgtttagtgaaccgtcagatcgcctggagacgccatccacgctgttttgacctccatagaagacaccgggaccgatccagcctccgcggattcgaatcccggccgggaacggtgcattggaacgcggattccccgtgccaagagtgacgtaagtaccgcctatagagtctataggcccacaaaaaatgctttcttcttttaatatacttttttgtttatcttatttctaatactttccctaatctctttctttcagggcaataatgatacaatgtatcatgcctctttgcaccattctaaagaataacagtgataatttctgggttaaggcaatagcaatatttctgcatataaatatttctgcatataaattgtaactgatgtaagaggtttcatattgctaatagcagctacaatccagctaccattctgcttttattttatggttgggataaggctggattattctgagtccaagctaggcccttttgctaatcatgttcatacctcttatcttcctcccacagctcctgggcaacgtgctggtctgtgtgctggcccatcactttggcaaagaattgggattcgaaccggtcgccaccggtcaccaagcaggaagtcaaagactttttccggtgggcaaaggatcacgtggttgaggtggagcatgaattctacgtcaaaaagggtggagccaagaaaagacccgcccccagtgacgcagatataagtgagcccaaacgggtgcgcgagtcagttgcgcagccatcgacgtcagacgcggaagcttcgatcaactacgcggacaggtaccaaaacaaatgttctcgtcacgtgggcatgaatctgatgctgtttccctgcagacaatgcgagagactgaatcagaattcaaatatctgcttcactcacggtgtcaaagactgtttagagtgctttcccgtgtcagaatctcaacccgtttctgtcgtcaaaaaggcgtatcagaaactgtgctacattcatcacatcatgggaaaggtgccagacgcttgcactgcttgcgacctggtcaatgtggacttggatgactgtgtttctgaacaataaatgacttaaaccaggtatggctgccgatggttatcttccagattggctcgaggacaaccttagtgaaggaattcgcgagtggtgggctttgaaacctggagcccctcaacccaaggcaaatcaacaacatcaagacaacgctcgaggtcttgtgcttccgggttacaaataccttggacccggcaacggactcgacaagggggagccggtcaacgcagcagacgcggcggccctcgagcacgacaaggcctacgaccagcagctcaaggccggagacaacccgtacctcaagtacaaccacgccgacgccgagttccaggagcggctcaaagaagatacgtcttttgggggcaacctcgggcgagcagtcttccaggccaaaaagaggcttcttgaacctcttggtctggttgaggaagcggctaagacggctcctggaaagaagaggcctgtagagcagtctcctcaggaaccggactcctccgcgggtattggcaaatcgggtgcacagcccgctaaaaagagactcaatttcggtcagactggcgacacagagtcagtcccagaccctcaaccaatcggagaacctcccgcagccccctcaggtgtgggatctcttacaatggcttcaggtggtggcgcaccagtggcagacaataacgaaggtgccgatggagtgggtagttcctcgggaaattggcattgcgattcccaatggctgggggacagagtcatcaccaccagcacccgaacctgggccctgcccacctacaacaatcacctctacaagcaaatctccaacagcacatctggaggatcttcaaatgacaacgcctacttcggctacagcaccccctgggggtattttgacttcaacagattccactgccacttctcaccacgtgactggcagcgactcatcaacaacaactggggattccggcctaagcgactcaacttcaagctcttcaacattcaggtcaaagaggttacggacaacaatggagtcaagaccatcgccaataaccttaccagcacggtccaggtcttcacggactcagactatcagctcccgtacgtgctcgggtcggctcacgagggctgcctcccgccgttcccagcggacgttttcatgattcctcagtacgggtatctgacgcttaatgatggaagccaggccgtgggtcgttcgtccttttactgcctggaatatttcccgtcgcaaatgctaagaacgggtaacaacttccagttcagctacgagtttgagaacgtacctttccatagcagctacgctcacagccaaagcctggaccgactaatgaatccactcatcgaccaatacttgtactatctctcaaagactattaacggttctggacagaatcaacaaacgctaaaattcagtgtggccggacccagcaacatggctgtccagggaagaaactacatacctggacccagctaccgacaacaacgtgtctcaaccactgtgactcaaaacaacaacagcgaatttgcttggcctggagcttcttcttgggctctcaatggacgtaatagcttgatgaatcctggacctgctatggccagccacaaagaaggagaggaccgtttctttcctttgtctggatctttaatttttggcaaacaaggaactggaagagacaacgtggatgcggacaaagtcatgataaccaacgaagaagaaattaaaactactaacccggtagcaacggagtcctatggacaagtggccacaaaccaccagagtgcccaagcacaggcgcagaccggctgggttcaaaaccaaggaatacttccgggtatggtttggcaggacagagatgtgtacctgcaaggacccatttgggccaaaattcctcacacggacggcaactttcacccttctccgctgatgggagggtttggaatgaagcacccgcctcctcagatcctcatcaaaaacacacctgtacctgcggatcctccaacggccttcaacaaggacaagctgaactctttcatcacccagtattctactggccaagtcagcgtggagatcgagtgggagctgcagaaggaaaacagcaagcgctggaacccggagatccagtacacttccaactattacaagtctaataatgttgaatttgctgttaatactgaaggtgtatatagtgaaccccgccccattggcaccagatacctgactcgtaatctgtaatcgattgttaatcaataaaccgtttaattcgtttcagttgaactttggtctctgcgtatttctttcttatctagtttccatggctacgtagataagtagcatggcgggttaatcattaactacaaggaacccctagtgatggagttggccactccctctctgcgcgctcgctcgctcactgaggccgggcgaccaaaggtcgcccgacgcccgggctttgcccgggcggcctcagtgagcgagcgagcgcgcagagagggagtggccaa

SEQ ID NO: 12 - DNA, 4338 bp, synthetic construct
  misc_feature 1..4338: note = Description of Artificial Sequence: Synthetic polynucleotide
  source 1..4338: mol_type = other DNA
ttggccactccctctctgcgcgctcgctcgctcactgaggccgggcgaccaaaggtcgcccgacgcccgggctttgcccgggcggcctcagtgagcgagcgagcgcgcagagagggagtggccaactccatcactaggggttcctggaggggtggagtcgtgacgatatccatgcgtcgacataacgcgttagtatctgcagagggccctgcgtatgagtgcaagtgggttttaggaccaggatgaggcggggtgggggtgcctacctgacgaccgaccccgacccactggacaagcacccaacccccattccccaaattgcgcatcccctatcagagagggggaggggaaacaggatgcggcgaggcgcgtgcgcactgccagcttcagcaccgcggacagtgccttcgcccccgcctggcggcgcgcgccaccgccgcctcagcactgaaggcgcgctgacgtcactcgccggtcccccgcaaactccccttcccggccaccttggtcgcgtccgcgccgccgccggcccagccggaccgcaccacgcgaggcgcgagataggggggcacgggcgcgaccatctgcgctgcggcgccggcgactcagcgctgcctcagtctgcggtgggcagcggaggagtcgtgtcgtgcctgagagcgcagctgtgctcctgggcaccgcgcagtccgcccccgcggctcctggccagaccacccctaggaccccctgccccaagtcgcagccaagcttcgtttagtgaaccgtcagatcgcctggagacgccatccacgctgttttgacctccatagaagacaccgggaccgatccagcctccgcggattcgaatcccggccgggaacggtgcattggaacgcggattccccgtgccaagagtgacgtaagtaccgcctatagagtctataggcccacaaaaaatgctttcttcttttaatatacttttttgtttatcttatttctaatactttccctaatctctttctttcagggcaataatgatacaatgtatcatgcctctttgcaccattctaaagaataacagtgataatttctgggttaaggcaatagcaatatttctgcatataaatatttctgcatataaattgtaactgatgtaagaggtttcatattgctaatagcagctacaatccagctaccattctgcttttattttatggttgggataaggctggattattctgagtccaagctaggcccttttgctaatcatgttcatacctcttatcttcctcccacagctcctgggcaacgtgctggtctgtgtgctggcccatcactttggcaaagaattgggattcgaaccggtcgccaccggtcaccaagcaggaagtcaaagactttttccggtgggcaaaggatcacgtggttgaggtggagcatgaattctacgtcaaaaagggtggagccaagaaaagacccgcccccagtgacgcagatataagtgagcccaaacgggtgcgcgagtcagttgcgcagccatcgacgtcagacgcggaagcttcgatcaactacgcggacaggtaccaaaacaaatgttctcgtcacgtgggcatgaatctgatgctgtttccctgcagacaatgcgagagactgaatcagaattcaaatatctgcttcactcacggtgtcaaagactgtttagagtgctttcccgtgtcagaatctcaacccgtttctgtcgtcaaaaaggcgtatcagaaactgtgctacattcatcacatcatgggaaaggtgccagacgcttgcactgcttgcgacctggtcaatgtggacttggatgactgtgtttctgaacaataaatgacttaaaccaggtatggctgccgatggttatcttccagattggctcgaggacaaccttagtgaaggaattcgcgagtggtgggctttgaaacctggagcccctcaacccaaggcaaatcaacaacatcaagacaacgctcgaggtcttgtgcttccgggttacaaataccttggacccggcaacggactcgacaagggggagccggtcaacgcagcagacgcggcggccctcgagcacgacaaggcctacgaccagcagctcaaggccggagacaacccgtacctcaagtacaaccacgccgacgccgagttccaggagcggctcaaagaagatacgtcttttgggggcaacctcgggcgagcagtcttccaggccaaaaagaggcttcttgaacctcttggtctggttgaggaagcggctaagacggctcctggaaagaagaggcctgtagagcagtctcctcaggaaccggactcctccgcgggtattggcaaatcgggtgcacagcccgctaaaaagagactcaatttcggtcagactggcgacacagagtcagtcccagaccctcaaccaatcggagaacctcccgcagccccctcaggtgtgggatctcttacaatggcttcaggtggtggcgcaccagtggcagacaataacgaaggtgccgatggagtgggtagttcctcgggaaattggcattgcgattcccaatggctgggggacagagtcatcaccaccagcacccgaacctgggccctgcccacctacaacaatcacctctacaagcaaatctccaacagcacatctggaggatcttcaaatgacaacgcctacttcggctacagcaccccctgggggtattttgacttcaacagattccactgccacttctcaccacgtgactggcagcgactcatcaacaacaactggggattccggcctaagcgactcaacttcaagctcttcaacattcaggtcaaagaggttacggacaacaatggagtcaagaccatcgccaataaccttaccagcacggtccaggtcttcacggactcagactatcagctcccgtacgtgctcgggtcggctcacgagggctgcctcccgccgttcccagcggacgttttcatgattcctcagtacgggtatctgacgcttaatgatggaagccaggccgtgggtcgttcgtccttttactgcctggaatatttcccgtcgcaaatgctaagaacgggtaacaacttccagttcagctacgagtttgagaacgtacctttccatagcagctacgctcacagccaaagcctggaccgactaatgaatccactcatcgaccaatacttgtactatctctcaaagactattaacggttctggacagaatcaacaaacgctaaaattcagtgtggccggacccagcaacatggctgtccagggaagaaactacatacctggacccagctaccgacaacaacgtgtctcaaccactgtgactcaaaacaacaacagcgaatttgcttggcctggagcttcttcttgggctctcaatggacgtaatagcttgatgaatcctggacctgctatggccagccacaaagaaggagaggaccgtttctttcctttgtctggatctttaatttttggcaaacaaggaactggaagagacaacgtggatgcggacaaagtcatgataaccaacgaagaagaaattaaaactactaacccggtagcaacggagtcctatggacaagtggccacaaaccaccagagtgcccaagcacaggcgcagaccggctgggttcaaaaccaaggaatacttccgggtatggtttggcaggacagagatgtgtacctgcaaggacccatttgggccaaaattcctcacacggacggcaactttcacccttctccgctgatgggagggtttggaatgaagcacccgcctcctcagatcctcatcaaaaacacacctgtacctgcggatcctccaacggccttcaacaaggacaagctgaactctttcatcacccagtattctactggccaagtcagcgtggagatcgagtgggagctgcagaaggaaaacagcaagcgctggaacccggagatccagtacacttccaactattacaagtctaataatgttgaatttgctgttaatactgaaggtgtatatagtgaaccccgccccattggcaccagatacctgactcgtaatctgtaatcgattgttaatcaataaaccgtttaattcgtttcagttgaactttggtctctgcgtatttctttcttatctagtttccatggctacgtagataagtagcatggcgggttaatcattaactacaaggaacccctagtgatggagttggccactccctctctgcgcgctcgctcgctcactgaggccgggcgaccaaaggtcgcccgacgcccgggctttgcccgggcggcctcagtgagcgagcgagcgcgcagagagggagtggccaa

SEQ ID NO: 13 - DNA, 20 bp, synthetic construct
  misc_feature 1..20: note = Description of Artificial Sequence: Synthetic oligonucleotide
  source 1..20: mol_type = other DNA
gtgccaagagtgacctcctg

SEQ ID NO: 14 - DNA, 444 bp, synthetic construct
  misc_feature 1..444: note = Description of Artificial Sequence: Synthetic polynucleotide
  source 1..444: mol_type = other DNA
actgcccccgcgaccggcacgtacaacctccaggaaatcgtgcccggcagcgtgtggatggagagggacgtgtacctccaaggacccatctgggccaagatcccagagacgggggcgcactttcacccctctccggctatgggcggattcggactcaaacacccaccgcccatgatgctcatcaagaacacgcctgtgcccggaaatatcaccagcttctcggacgtgcccgtcagcagcttcatcacccagtacagcaccgggcaggtcaccgtggagatggagtgggagctcaagaaggaaaactccaagaggtggaacccagagatccagtacacaaacaactacaacgacccccagtttgtggactttgccccggacagcaccggggaatacagaaccaccagacctatcggaacccgataccttacccgacccctttaa

SEQ ID NO: 15 - DNA, 440 bp, synthetic construct
  misc_feature 1..440: note = Description of Artificial Sequence: Synthetic polynucleotide
  source 1..440: mol_type = other DNA
accggagatgtgcatgttatgggagccttacctggaatggtgtggcaagacagggacgtctacctgcagggtcctatttgggccaaaattcctcacacggatggacactttcacccatctcctctcatgggcggctttggacttaagcacccgcctcctcagatcctcatcaaaaacacgcctgttcctgcgaatcctccggcagagttttcggctacaaagtttgcttcattcatcacccagtattccacaggacaagtgagcgtggagattgaatgggagctgcagaaagaaaacagcaaacgctggaatcccgaagtgcaatatacatctaactatgcaaaatctgccaacgttgatttcactgtggacaacaatggactttatactgagcctcgccccattggcacccgttacctcacccgtcccctgtaatcgat

SEQ ID NO: 16 - DNA, 447 bp, synthetic construct
  misc_feature 1..447: note = Description of Artificial Sequence: Synthetic polynucleotide
  source 1..447: mol_type = other DNA
acacaagcagctaccgcagatgtcaacacacaaggcgttcttccaggcatggtctggcaggacagagatgtgtaccttcaggggcccatctgggcaaagattccacacacggacggacattttcacccctctcccctcatgggtggattcggacttaaacaccctccgcctcagatcctgatcaagaacacgcctgtacctgcggaccctccgaccaccttcaaccagtcaaagctgaactctttcatcacccagtattctactggccaagtcagcgtggagatcgagtgggagctgcagaaggaaaacagcaagcgctggaaccccgagatccagtacacctccaactactacaaatctacaagtgtggactttgctgttaatacagaaggcgtgtactctgaaccccgccccattggcacccgttacctcacccgtaatctgtaa

SEQ ID NO: 17 - DNA, 447 bp, synthetic construct
  misc_feature 1..447: note = Description of Artificial Sequence: Synthetic polynucleotide
  source 1..447: mol_type = other DNA
gcacaggcgcagaccggctgggttcaaaaccaaggaatacttccgggtatggtttggcaggacagagatgtgtacctgcaaggacccatttgggccaaaattcctcacacggacggcaactttcacccttctccgctgatgggagggtttggaatgaagcacccgcctcctcagatcctcatcaaaaacacacctgtacctgccgatcctccaacggccttcaacaaggacaagctgaactctttcatcacccagtattctactggccaagtcagcgtggagatcgagtgggagctgcagaaggaaaacagcaagcggtggaacccggagatccagtacacttccaactattacaagtctaataatgttgaatttgctgttaatactgaaggtgtatatagtgaaccccgccccattggcaccagatacctgactcgtaatctgtaa

SEQ ID NO: 18 - DNA, 4314 bp, synthetic construct
  misc_feature 1..4314: note = Description of Artificial Sequence: Synthetic polynucleotide
  source 1..4314: mol_type = other DNA
tatcagcacacaatagtccattatacgcgcgtataatgggcaattgtgtgctgatacagctggcacgacaggtttcccgactggaaagcgggcagtgagcgcaacgcaattaatgtgagttagctcactcattaggcaccccaggctttacactttatgcttccggctcgtatgttgtgtggaattgtgagcggataacaatttcacacaggaaacagctatgaccatgattacgccagatttaattaaggccttaattaggctagcttggccactccctctctgcgcgctcgctcgctcactgaggccgggcgaccaaaggtcgcccgacgcccgggctttgcccgggcggcctcagtgagcgagcgagcgcgcagagagggagtggccaactccatcactaggggttcctggaggggtggagtcgtgacgatatccatgcgtcgacataacgcgttagtatctgcagagggccctgcgtatgagtgcaagtgggttttaggaccaggatgaggcggggtgggggtgcctacctgacgaccgaccccgacccactggacaagcacccaacccccattccccaaattgcgcatcccctatcagagagggggaggggaaacaggatgcggcgaggcgcgtgcgcactgccagcttcagcaccgcggacagtgccttcgcccccgcctggcggcgcgcgccaccgccgcctcagcactgaaggcgcgctgacgtcactcgccggtcccccgcaaactccccttcccggccaccttggtcgcgtccgcgccgccgccggcccagccggaccgcaccacgcgaggcgcgagataggggggcacgggcgcgaccatctgcgctgcggcgccggcgactcagcgctgcctcagtctgcggtgggcagcggaggagtcgtgtcgtgcctgagagcgcagctgtgctcctgggcaccgcgcagtccgcccccgcggctcctggccagaccacccctaggaccccctgccccaagtcgcagccaagcttcgtttagtgaaccgtcagatcgcctggagacgccatccacgctgttttgacctccatagaagacaccgggaccgatccagcctccgcggattcgaatcccggccgggaacggtgcattggaacgcggattccccgtgccaagagtgacgtaagtaccgcctatagagtctataggcccacaaaaaatgctttcttcttttaatatacttttttgtttatcttatttctaatactttccctaatctctttctttcagggcaataatgatacaatgtatcatgcctctttgcaccattctaaagaataacagtgataatttctgggttaaggcaatagcaatatttctgcatataaatatttctgcatataaattgtaactgatgtaagaggtttcatattgctaatagcagctacaatccagctaccattctgcttttattttatggttgggataaggctggattattctgagtccaagctaggcccttttgctaatcatgttcatacctcttatcttcctcccacagctcctgggcaacgtgctggtctgtgtgctggcccatcactttggcaaagaattgggattcgaaccggtcgccaccggtcaccaagcaggaagtcaaagactttttccggtgggcaaaggatcacgtggttgaggtggagcatgaattctacgtcaaaaagggtggagccaagaaaagacccgcccccagtgacgcagatataagtgagcccaaacgggtgcgcgagtcagttgcgcagccatcgacgtcagacgcggaagcttcgatcaactacgcggacaggtaccaaaacaaatgttctcgtcacgtgggcatgaatctgatgctgtttccctgcagacaatgcgagagactgaatcagaattcaaatatctgcttcactcacggtgtcaaagactgtttagagtgctttcccgtgtcagaatctcaacccgtttctgtcgtcaaaaaggcgtatcagaaactgtgctacattcatcacatcatgggaaaggtgccagacgcttgcactgcttgcgacctggtcaatgtggacttggatgactgtgtttctgaacaataaatgacttaaaccaggtatggctgccgatggttatcttccagattggctcgaggacaaccttagtgaaggaattcgcgagtggtgggctttgaaacctggagcccctcaacccaaggcaaatcaacaacatcaagacaacgctcgaggtcttgtgcttccgggttacaaataccttggacccggcaacggactcgacaagggggagccggtcaacgcagcagacgcggcggccctcgagcacgacaaggcctacgaccagcagctcaaggccggagacaacccgtacctcaagtacaaccacgccgacgccgagttccaggagcggctcaaagaagatacgtcttttgggggcaacctcgggcgagcagtcttccaggccaaaaagaggcttcttgaacctcttggtctggttgaggaagcggctaagacggctcctggaaagaagaggcctgtagagcagtctcctcaggaaccggactcctccgcgggtattggcaaatcgggtgcacagcccgctaaaaagagactcaatttcggtcagactggcgacacagagtcagtcccagaccctcaaccaatcggagaacctcccgcagccccctcaggtgtgggatctcttacaatggcttcaggtggtggcgcaccagtggcagacaataacgaaggtgccgatggagtgggtagttcctcgggaaattggcattgcgattcccaatggctgggggacagagtcatcaccaccagcacccgaacctgggccctgcccacctacaacaatcacctctacaagcaaatctccaacagcacatctggaggatcttcaaatgacaacgcctacttcggctacagcaccccctgggggtattttgacttcaacagattccactgccacttctcaccacgtgactggcagcgactcatcaacaacaactggggattccggcctaagcgactcaacttcaagctcttcaacattcaggtcaaagaggttacggacaacaatggagtcaagaccatcgccaataaccttaccagcacggtccaggtcttcacggactcagactatcagctcccgtacgtgctcgggtcggctcacgagggctgcctcccgccgttcccagcggacgttttcatgattcctcagtacgggtatctgacgcttaatgatggaagccaggccgtgggtcgttcgtccttttactgcctggaatatttcccgtcgcaaatgctaagaacgggtaacaacttccagttcagctacgagtttgagaacgtacctttccatagcagctacgctcacagccaaagcctggaccgactaatgaatccactcatcgaccaatacttgtactatctctcaaagactattaacggttctggacagaatcaacaaacgctaaaattcagtgtggccggacccagcaacatggctgtccagggaagaaactacatacctggacccagctaccgacaacaacgtgtctcaaccactgtgactcaaaacaacaacagcgaatttgcttggcctggagcttcttcttgggctctcaatggacgtaatagcttgatgaatcctggacctgctatggccagccacaaagaaggagaggaccgtttctttcctttgtctggatctttaatttttggcaaacaaggaactggaagagacaacgtggatgcggacaaagtcatgataaccaacgaagaagaaattaaaactactaacccggtagcaacggagtcctatggacaagtggccacaaaccaccagagtgtacatcgattgttaatcaataaaccgtttaattcgtttcagttgaactttggtctctgcgtatttctttcttatctagtttccatggctacgtagataagtagcatggcgggttaatcattaactacaaggaacccctagtgatggagttggccactccctctctgcgcgctcgctcgctcactgaggccgggcgaccaaaggtcgcccgacgcccgggctttgcccgggcggcctcagtgagcgagcgagcgcgcagagagggagtggccaagcatgcaattaactggccgtcgttttacaacgtcgtgactgggaaaaccctggcgttacccaacttaatcgccttgcagcacatccccctttcgccagctgtatcagcacacaattgcccattatacgcgcgtataatggactattgtgtgctgata

SEQ ID NO: 19 - DNA, 4456 bp, synthetic construct
  misc_feature 1..4456: note = Description of Artificial Sequence: Synthetic polynucleotide
  source 1..4456: mol_type = other DNA
tatcagcacacaatagtccattatacgcgcgtataatgggcaattgtgtgctgatacagctggcacgacaggtttcccgactggaaagcgggcagtgagcgcaacgcaattaatgtgagttagctcactcattaggcaccccaggctttacactttatgcttccggctcgtatgttgtgtggaattgtgagcggataacaatttcacacaggaaacagctatgaccatgattacgccagatttaattaaggccttaattaggctagcttggccactccctctctgcgcgctcgctcgctcactgaggccgggcgaccaaaggtcgcccgacgcccgggctttgcccgggcggcctcagtgagcgagcgagcgcgcagagagggagtggccaactccatcactaggggttcctggaggggtggagtcgtgacgatatccatgcgtcgacataacgcgtgatctaacatatcctggtgtggagtagcggacgctgctatgacagaggctcgggggcctgagctggctctgtgagctggggaggaggcagacagccaggccttgtctgcaagcagacctggcagcattgggctggccgccccccagggcctcctcttcatgcccagtgaatgactcaccttggcacagacacaatgttcggggtgggcacagtgcctgcttcccgccgcaccccagcccccctcaaatgccttccgagaagcccattgagcagggggcttgcattgcaccccagcctgacagcctggcatcttgggataaaagcagcacagccccctaggggctgcccttgctgtgtggcgccaccggcggtggagaacaaggctctattcagcctgtgcccaggaaaggggatcaggggatgcccaggcatggacagtgggtggcagggggggagaggagggctgtctgcttcccagaagtccaaggacacaaatgggtgaggggagagctctccccatagctgggctgcggcccaaccccaccccctcaggctatgccagggggtgttgccaggggcacccgggcatcgccagtctagcccactccttcataaagccctcgcatcccaggagcgagcagagccagagcaggttggagaggagacgcatcacctccgctgctcgcggggatcctctagaagcttcgtttagtgaaccgtcagatcgcctggagacgccatccacgctgttttgacctccatagaagacaccgggaccgatccagcctccgcggattcgaatcccggccgggaacggtgcattggaacgcggattccccgtgccaagagtgacgtaagtaccgcctatagagtctataggcccacaaaaaatgctttcttcttttaatatacttttttgtttatcttatttctaatactttccctaatctctttctttcagggcaataatgatacaatgtatcatgcctctttgcaccattctaaagaataacagtgataatttctgggttaaggcaatagcaatatttctgcatataaatatttctgcatataaattgtaactgatgtaagaggtttcatattgctaatagcagctacaatccagctaccattctgcttttattttatggttgggataaggctggattattctgagtccaagctaggcccttttgctaatcatgttcatacctcttatcttcctcccacagctcctgggcaacgtgctggtctgtgtgctggcccatcactttggcaaagaattgggattcgaaccggtcgccaccggtcaccaagcaggaagtcaaagactttttccggtgggcaaaggatcacgtggttgaggtggagcatgaattctacgtcaaaaagggtggagccaagaaaagacccgcccccagtgacgcagatataagtgagcccaaacgggtgcgcgagtcagttgcgcagccatcgacgtcagacgcggaagcttcgatcaactacgcggacaggtaccaaaacaaatgttctcgtcacgtgggcatgaatctgatgctgtttccctgcagacaatgcgagagactgaatcagaattcaaatatctgcttcactcacggtgtcaaagactgtttagagtgctttcccgtgtcagaatctcaacccgtttctgtcgtcaaaaaggcgtatcagaaactgtgctacattcatcacatcatgggaaaggtgccagacgcttgcactgcttgcgacctggtcaatgtggacttggatgactgtgtttctgaacaataaatgacttaaaccaggtatggctgccgatggttatcttccagattggctcgaggacaaccttagtgaaggaattcgcgagtggtgggctttgaaacctggagcccctcaacccaaggcaaatcaacaacatcaagacaacgctcgaggtcttgtgcttccgggttacaaataccttggacccggcaacggactcgacaagggggagccggtcaacgcagcagacgcggcggccctcgagcacgacaaggcctacgaccagcagctcaaggccggagacaacccgtacctcaagtacaaccacgccgacgccgagttccaggagcggctcaaagaagatacgtcttttgggggcaacctcgggcgagcagtcttccaggccaaaaagaggcttcttgaacctcttggtctggttgaggaagcggctaagacggctcctggaaagaagaggcctgtagagcagtctcctcaggaaccggactcctccgcgggtattggcaaatcgggtgcacagcccgctaaaaagagactcaatttcggtcagactggcgacacagagtcagtcccagaccctcaaccaatcggagaacctcccgcagccccctcaggtgtgggatctcttacaatggcttcaggtggtggcgcaccagtggcagacaataacgaaggtgccgatggagtgggtagttcctcgggaaattggcattgcgattcccaatggctgggggacagagtcatcaccaccagcacccgaacctgggccctgcccacctacaacaatcacctctacaagcaaatctccaacagcacatctggaggatcttcaaatgacaacgcctacttcggctacagcaccccctgggggtattttgacttcaacagattccactgccacttctcaccacgtgactggcagcgactcatcaacaacaactggggattccggcctaagcgactcaacttcaagctcttcaacattcaggtcaaagaggttacggacaacaatggagtcaagaccatcgccaataaccttaccagcacggtccaggtcttcacggactcagactatcagctcccgtacgtgctcgggtcggctcacgagggctgcctcccgccgttcccagcggacgttttcatgattcctcagtacgggtatctgacgcttaatgatggaagccaggccgtgggtcgttcgtccttttactgcctggaatatttcccgtcgcaaatgctaagaacgggtaacaacttccagttcagctacgagtttgagaacgtacctttccatagcagctacgctcacagccaaagcctggaccgactaatgaatccactcatcgaccaatacttgtactatctctcaaagactattaacggttctggacagaatcaacaaacgctaaaattcagtgtggccggacccagcaacatggctgtccagggaagaaactacatacctggacccagctaccgacaacaacgtgtctcaaccactgtgactcaaaacaacaacagcgaatttgcttggcctggagcttcttcttgggctctcaatggacgtaatagcttgatgaatcctggacctgctatggccagccacaaagaaggagaggaccgtttctttcctttgtctggatctttaatttttggcaaacaaggaactggaagagacaacgtggatgcggacaaagtcatgataaccaacgaagaagaaattaaaactactaacccggtagcaacggagtcctatggacaagtggccacaaaccaccagagtgtacatcgattgttaatcaataaaccgtttaattcgtttcagttgaactttggtctctgcgtatttctttcttatctagtttccatggctacgtagataagtagcatggcgggttaatcattaactacaaggaacccctagtgatggagttggccactccctctctgcgcgctcgctcgctcactgaggccgggcgaccaaaggtcgcccgacgcccgggctttgcccgggcggcctcagtgagcgagcgagcgcgcagagagggagtggccaagcatgcaattaactggccgtcgttttacaacgtcgtgactgggaaaaccctggcgttacccaacttaatcgccttgcagcacatccccctttcgccagctgtatcagcacacaattgcccattatacgcgcgtataatggactattgtgtgctgata

SEQ ID NO: 20 - DNA, 4283 bp, synthetic construct
  misc_feature 1..4283: note = Description of Artificial Sequence: Synthetic polynucleotide
  source 1..4283: mol_type = other DNA
tatcagcacacaatagtccattatacgcgcgtataatgggcaattgtgtgctgatacagctggcacgacaggtttcccgactggaaagcgggcagtgagcgcaacgcaattaatgtgagttagctcactcattaggcaccccaggctttacactttatgcttccggctcgtatgttgtgtggaattgtgagcggataacaatttcacacaggaaacagctatgaccatgattacgccagatttaattaaggccttaattaggctagcttggccactccctctctgcgcgctcgctcgctcactgaggccgggcgaccaaaggtcgcccgacgcccgggctttgcccgggcggcctcagtgagcgagcgagcgcgcagagagggagtggccaactccatcactaggggttcctggaggggtggagtcgtgacgatatccatgcgtcgacataacgcgttagtatctgcagagggccctgcgtatgagtgcaagtgggttttaggaccaggatgaggcggggtgggggtgcctacctgacgaccgaccccgacccactggacaagcacccaacccccattccccaaattgcgcatcccctatcagagagggggaggggaaacaggatgcggcgaggcgcgtgcgcactgccagcttcagcaccgcggacagtgccttcgcccccgcctggcggcgcgcgccaccgccgcctcagcactgaaggcgcgctgacgtcactcgccggtcccccgcaaactccccttcccggccaccttggtcgcgtccgcgccgccgccggcccagccggaccgcaccacgcgaggcgcgagataggggggcacgggcgcgaccatctgcgctgcggcgccggcgactcagcgctgcctcagtctgcggtgggcagcggaggagtcgtgtcgtgcctgagagcgcagctgtgctcctgggcaccgcgcagtccgcccccgcggctcctggccagaccacccctaggaccccctgccccaagtcgcagccaagcttcgtttagtgaaccgtcagatcgcctggagacgccatccacgctgttttgacctccatagaagacaccgggaccgatccagcctccgcggattcgaatcccggccgggaacggtgcattggaacgcggattccccgtgccaagagtgacgtaagtaccgcctatagagtctataggcccacaaaaaatgctttcttcttttaatatacttttttgtttatcttatttctaatactttccctaatctctttctttcagggcaataatgatacaatgtatcatgcctctttgcaccattctaaagaataacagtgataatttctgggttaaggcaatagcaatatttctgcatataaatatttctgcatataaattgtaactgatgtaagaggtttcatattgctaatagcagctacaatccagctaccattctgcttttattttatggttgggataaggctggattattctgagtccaagctaggcccttttgctaatcatgttcatacctcttatcttcctcccacagctcctgggcaacgtgctggtctgtgtgctggcccatcactttggcaaagaattgggattcgaaccggtcgccaccggtcacaagcaggaagtcaaagactttttccggtgggcaaaggatcacgtggttgaggtggagcatgaattctacgtcaaaaagggtggagccaagaaaagacccgcccccagtgacgcagatataagtgagcccaaacgggtgcgcgagtcagttgcgcagccatcgacgtcagacgcggaagcttcgatcaactacgcggacaggtaccaaaacaaatgttctcgtcacgtgggcatgaatctgatgctgtttccctgcagacaatgcgagagaatgaatcagaattcaaatatctgcttcactcacggacagaaagactgtttagagtgctttcccgtgtcagaatctcaacccgtttctgtcgtcaaaaaggcgtatcagaaactgtgctacattcatcatatcatgggaaaggtgccagacgcttgcactgcctgcgatctggtcaatgtggatttggatgactgcatctttgaacaataaatgatttaaatcaggtatgtcttttgttgatcaccctccagattggttggaagaagttggtgaaggtcttcgcgagtttttgggccttgaagcgggcccaccgaaaccaaaacccaatcagcagcatcaagatcaagcccgtggtcttgtgctgcctggttataactatctcggacccggaaacggtctcgatcgaggagagcctgtcaacagggcagacgaggtcgcgcgagagcacgacatctcgtacaacgagcagcttgaggcgggagacaacccctacctcaagtacaaccacgcggacgccgagtttcaggagaagctcgccgacgacacatccttcgggggaaacctcggaaaggcagtctttcaggccaagaaaagggttctcgaaccttttggcctggttgaagagggtgctaagacggcccctaccggaaagcggatagacgaccactttccaaaaagaaagaaggcccggaccgaagaggactccaagccttccacctcgtcagacgccgaagctggacccagcggatcccagcagctgcaaatcccagcccaaccagcctcaagtttgggagctgatacaatgtctgcgggaggtggcggcccattgggcgacaataaccaaggtgccgatggagtgggcaatgcctcgggagattggcattgcgattccacgtggatgggggacagagtcgtcaccaagtccacccgaacctgggtgctgcccagctacaacaaccaccagtaccgagagatcaaaagcggctccgtcgacggaagcaacgccaacgcctactttggatacagcaccccctgggggtactttgactttaaccgcttccacagccactggagcccccgagactggcaaagactcatcaacaactactggggcttcagaccccggtccctcagagtcaaaatcttcaacattcaagtcaaagaggtcacggtgcaggactccaccaccaccatcgccaacaacctcacctccaccgtccaagtgtttacggacgacgactaccagctgccctacgtcgtcggcaacgggaccgagggatgcctgccggccttccctccgcaggtctttacgctgccgcagtacggttacgcgacgctgaaccgcgacaacacagaaaatcccaccgagaggagcagcttcttctgcctagagtactttcccagcaagatgctgagaacgggcaacaactttgagtttacctacaactttgaggaggtgcccttccactccagcttcgctcccagtcagaacctcttcaagctggccaacccgctggtggaccagtacttgtaccgcttcgtgagcacaaataacactggcggagtccagttcaacaagaacctggccgggagatacgccaacacctacaaaaactggttcccggggcccatgggccgaacccagggctggaacctgggctccggggtcaaccgcgccagtgtcagcgccttcgccacgaccaataggatggagctcgagggcgcgagttaccaggtgcccccgcagccgaacggcatgaccaacaacctccagggcagcaacacctatgccctggagaacactatgatcttcaacagccagccggcgaacccgggcaccaccgccacgtacctcgagggcaacatgctcatcaccagcgagagcgagacgcagccggtgaaccgcgtggcgtacaacgtcggcgggcagatggccaccaacaaccagagctctgtacatcgattgttaatcaataaaccgtttaattcgtttcagttgaactttggtctctgcgtatttctttcttatctagtttccatggctacgtagataagtagcatggcgggttaatcattaactacaaggaacccctagtgatggagttggccactccctctctgcgcgctcgctcgctcactgaggccgggcgaccaaaggtcgcccgacgcccgggctttgcccgggcggcctcagtgagcgagcgagcgcgcagagagggagtggccaagcatgcaattaactggccgtcgttttacaacgtcgtgactgggaaaaccctggcgttacccaacttaatcgccttgcagcacatccccctttcgccagctgtatcagcacacaattgcccattatacgcgcgtataatggactattgtgtgctgata

SEQ ID NO: 21 - DNA, 4426 bp, synthetic construct
  misc_feature 1..4426: note = Description of Artificial Sequence: Synthetic polynucleotide
  source 1..4426: mol_type = other DNA
tatcagcacacaatagtccattatacgcgcgtataatgggcaattgtgtgctgatacagctggcacgacaggtttcccgactggaaagcgggcagtgagcgcaacgcaattaatgtgagttagctcactcattaggcaccccaggctttacactttatgcttccggctcgtatgttgtgtggaattgtgagcggataacaatttcacacaggaaacagctatgaccatgattacgccagatttaattaaggccttaattaggctagcttggccactccctctctgcgcgctcgctcgctcactgaggccgggcgaccaaaggtcgcccgacgcccgggctttgcccgggcggcctcagtgagcgagcgagcgcgcagagagggagtggccaactccatcactaggggttcctggaggggtggagtcgtgacgatatccatgcgtcgacataacgcgtgatctaacatatcctggtgtggagtagcggacgctgctatgacagaggctcgggggcctgagctggctctgtgagctggggaggaggcagacagccaggccttgtctgcaagcagacctggcagcattgggctggccgccccccagggcctcctcttcatgcccagtgaatgactcaccttggcacagacacaatgttcggggtgggcacagtgcctgcttcccgccgcaccccagcccccctcaaatgccttccgagaagcccattgagcagggggcttgcattgcaccccagcctgacagcctggcatcttgggataaaagcagcacagccccctaggggctgcccttgctgtgtggcgccaccggcggtggagaacaaggctctattcagcctgtgcccaggaaaggggatcaggggatgcccaggcatggacagtgggtggcagggggggagaggagggctgtctgcttcccagaagtccaaggacacaaatgggtgaggggagagctctccccatagctgggctgcggcccaaccccaccccctcaggctatgccagggggtgttgccaggggcacccgggcatcgccagtctagcccactccttcataaagccctcgcatcccaggagcgagcagagccagagcaggttggagaggagacgcatcacctccgctgctcgcggggatcctctagaagcttcgtttagtgaaccgtcagatcgcctggagacgccatccacgctgttttgacctccatagaagacaccgggaccgatccagcctccgcggattcgaatcccggccgggaacggtgcattggaacgcggattccccgtgccaagagtgacgtaagtaccgcctatagagtctataggcccacaaaaaatgctttcttcttttaatatacttttttgtttatcttatttctaatactttccctaatctctttctttcagggcaataatgatacaatgtatcatgcctctttgcaccattctaaagaataacagtgataatttctgggttaaggcaatagcaatatttctgcatataaatatttctgcatataaattgtaactgatgtaagaggtttcatattgctaatagcagctacaatccagctaccattctgcttttattttatggttgggataaggctggattattctgagtccaagctaggcccttttgctaatcatgttcatacctcttatcttcctcccacagctcctgggcaacgtgctggtctgtgtgctggcccatcactttggcaaagaattgggattcgaaccggtcgccaccggtcaccaagcaggaagtcaaagactttttccggtgggcaaaggatcacgtggttgaggtggagcatgaattctacgtcaaaaagggtggagccaagaaaagacccgcccccagtgacgcagatataagtgagcccaaacgggtgcgcgagtcagttgcgcagccatcgacgtcagacgcggaagcttcgatcaactacgcggacaggtaccaaaacaaatgttctcgtcacgtgggcatgaatctgatgctgtttccctgcagacaatgcgagagaatgaatcagaattcaaatatctgcttcactcacggacagaaagactgtttagagtgctttcccgtgtcagaatctcaacccgtttctgtcgtcaaaaaggcgtatcagaaactgtgctacattcatcatatcatgggaaaggtgccagacgcttgcactgcctgcgatctggtcaatgtggatttggatgactgcatctttgaacaataaatgatttaaatcaggtatgtcttttgttgatcaccctccagattggttggaagaagttggtgaaggtcttcgcgagtttttgggccttgaagcgggcccaccgaaaccaaaacccaatcagcagcatcaagatcaagcccgtggtcttgtgctgcctggttataactatctcggacccggaaacggtctcgatcgaggagagcctgtcaacagggcagacgaggtcgcgcgagagcacgacatctcgtacaacgagcagcttgaggcgggagacaacccctacctcaagtacaaccacgcggacgccgagtttcaggagaagctcgccgacgacacatccttcgggggaaacctcggaaaggcagtctttcaggccaagaaaagggttctcgaaccttttggcctggttgaagagggtgctaagacggcccctaccggaaagcggatagacgaccactttccaaaaagaaagaaggcccggaccgaagaggactccaagccttccacctcgtcagacgccgaagctggacccagcggatcccagcagctgcaaatcccagcccaaccagcctcaagtttgggagctgatacaatgtctgcgggaggtggcggcccattgggcgacaataaccaaggtgccgatggagtgggcaatgcctcgggagattggcattgcgattccacgtggatgggggacagagtcgtcaccaagtccacccgaacctgggtgctgcccagctacaacaaccaccagtaccgagagatcaaaagcggctccgtcgacggaagcaacgccaacgcctactttggatacagcaccccctgggggtactttgactttaaccgcttccacagccactggagcccccgagactggcaaagactcatcaacaactactggggcttcagaccccggtccctcagagtcaaaatcttcaacattcaagtcaaagaggtcacggtgcaggactccaccaccaccatcgccaacaacctcacctccaccgtccaagtgtttacggacgacgactaccagctgccctacgtcgtcggcaacgggaccgagggatgcctgccggccttccctccgcaggtctttacgctgccgcagtacggttacgcgacgctgaaccgcgacaacacagaaaatcccaccgagaggagcagcttcttctgcctagagtactttcccagcaagatgctgagaacgggcaacaactttgagtttacctacaactttgaggaggtgcccttccactccagcttcgctcccagtcagaacctcttcaagctggccaacccgctggtggaccagtacttgtaccgcttcgtgagcacaaataacactggcggagtccagttcaacaagaacctggccgggagatacgccaacacctacaaaaactggttcccggggcccatgggccgaacccagggctggaacctgggctccggggtcaaccgcgccagtgtcagcgccttcgccacgaccaataggatggagctcgagggcgcgagttaccaggtgcccccgcagccgaacggcatgaccaacaacctccagggcagcaacacctatgccctggagaacactatgatcttcaacagccagccggcgaacccgggcaccaccgccacgtacctcgagggcaacatgctcatcaccagcgagagcgagacgcagccggtgaaccgcgtggcgtacaacgtcggcgggcagatggccaccaacaaccagagctctgtacatcgattgttaatcaataaaccgtttaattcgtttcagttgaactttggtctctgcgtatttctttcttatctagtttccatggctacgtagataagtagcatggcgggttaatcattaactacaaggaacccctagtgatggagttggccactccctctctgcgcgctcgctcgctcactgaggccgggcgaccaaaggtcgcccgacgcccgggctttgcccgggcggcctcagtgagcgagcgagcgcgcagagagggagtggccaagcatgcaattaactggccgtcgttttacaacgtcgtgactgggaaaaccctggcgttacccaacttaatcgccttgcagcacatccccctttcgccagctgtatcagcacacaattgcccattatacgcgcgtataatggactattgtgtgctgata

SEQ ID NO: 22 - DNA, 4313 bp, synthetic construct
  misc_feature 1..4313: note = Description of Artificial Sequence: Synthetic polynucleotide
  source 1..4313: mol_type = other DNA
tatcagcacacaatagtccattatacgcgcgtataatgggcaattgtgtgctgatacagctggcacgacaggtttcccgactggaaagcgggcagtgagcgcaacgcaattaatgtgagttagctcactcattaggcaccccaggctttacactttatgcttccggctcgtatgttgtgtggaattgtgagcggataacaatttcacacaggaaacagctatgaccatgattacgccagatttaattaaggccttaattaggctagcttggccactccctctctgcgcgctcgctcgctcactgaggccgggcgaccaaaggtcgcccgacgcccgggctttgcccgggcggcctcagtgagcgagcgagcgcgcagagagggagtggccaactccatcactaggggttcctggaggggtggagtcgtgacgatatccatgcgtcgacataacgcgttagtatctgcagagggccctgcgtatgagtgcaagtgggttttaggaccaggatgaggcggggtgggggtgcctacctgacgaccgaccccgacccactggacaagcacccaacccccattccccaaattgcgcatcccctatcagagagggggaggggaaacaggatgcggcgaggcgcgtgcgcactgccagcttcagcaccgcggacagtgccttcgcccccgcctggcggcgcgcgccaccgccgcctcagcactgaaggcgcgctgacgtcactcgccggtcccccgcaaactccccttcccggccaccttggtcgcgtccgcgccgccgccggcccagccggaccgcaccacgcgaggcgcgagataggggggcacgggcgcgaccatctgcgctgcggcgccggcgactcagcgctgcctcagtctgcggtgggcagcggaggagtcgtgtcgtgcctgagagcgcagctgtgctcctgggcaccgcgcagtccgcccccgcggctcctggccagaccacccctaggaccccctgccccaagtcgcagccaagcttcgtttagtgaaccgtcagatcgcctggagacgccatccacgctgttttgacctccatagaagacaccgggaccgatccagcctccgcggattcgaatcccggccgggaacggtgcattggaacgcggattccccgtgccaagagtgacgtaagtaccgcctatagagtctataggcccacaaaaaatgctttcttcttttaatatacttttttgtttatcttatttctaatactttccctaatctctttctttcagggcaataatgatacaatgtatcatgcctctttgcaccattctaaagaataacagtgataatttctgggttaaggcaatagcaatatttctgcatataaatatttctgcatataaattgtaactgatgtaagaggtttcatattgctaatagcagctacaatccagctaccattctgcttttattttatggttgggataaggctggattattctgagtccaagctaggcccttttgctaatcatgttcatacctcttatcttcctcccacagctcctgggcaacgtgctggtctgtgtgctggcccatcactttggcaaagaattgggattcgaaccggtcgccaccggtcacaagcaggaagtcaaagactttttccggtgggcaaaggatcacgtggttgaggtggagcatgaattctacgtcaaaaagggtggagccaagaaaagacccgcccccagtgacgcagatataagtgagcccaaacgggtgcgcgagtcagttgcgcagccatcgacgtcagacgcggaagcttcgatcaactacgcggacaggtaccaaaacaaatgttctcgtcacgtgggcatgaatctgatgctgtttccctgcagacaatgcgagagaatgaatcagaattcaaatatctgcttcactcacggacagaaagactgtttagagtgctttcccgtgtcagaatctcaacccgtttctgtcgtcaaaaaggcgtatcagaaactgtgctacattcatcatatcatgggaaaggtgccagacgcttgcactgcctgcgatctggtcaatgtggatttggatgactgcatctttgaacaataaatgatttaaatcaggtatggctgccgatggttatcttccagattggctcgaggacaacctctctgagggcattcgcgagtggtgggacttgaaacctggagccccgaaacccaaagccaaccagcaaaagcaggacgacggccggggtctggtgcttcctggctacaagtacctcggacccttcaacggactcgacaagggggagcccgtcaacgcggcggatgcagcggccctcgagcacgacaaggcctacgaccagcagctcaaagcgggtgacaatccgtacctgcggtataaccacgccgacgccgagtttcaggagcgtctgcaagaagatacgtcttttgggggcaacctcgggcgagcagtcttccaggccaagaagagggttctcgaaccttttggtctggttgaggaaggtgctaagacggctcctggaaagaaacgtccggtagagcagtcgccacaagagccagactcctcctcgggcattggcaagacaggccagcagcccgctaaaaagagactcaattttggtcagactggcgactcagagtcagtccccgacccacaacctctcggagaacctccagcaacccccgctgctgtgggacctactacaatggcttcaggcggtggcgcaccaatggcagacaataacgaaggcgccgacggagtgggtaatgcctcaggaaattggcattgcgattccacatggctgggcgacagagtcatcaccaccagcacccgaacatgggccttgcccacctataacaaccacctctacaagcaaatctccagtgcttcaacgggggccagcaacgacaaccactacttcggctacagcaccccctgggggtattttgatttcaacagattccactgccatttctcaccacgtgactggcagcgactcatcaacaacaattggggattccggcccaagagactcaacttcaagctcttcaacatccaagtcaaggaggtcacgacgaatgatggcgtcacgaccatcgctaataaccttaccagcacggttcaagtcttctcggactcggagtaccagttgccgtacgtcctcggctctgcgcaccagggctgcctccctccgttcccggcggacgtgttcatgattccgcagtacggctacctaacgctcaacaatggcagccaggcagtgggacggtcatccttttactgcctggaatatttcccatcgcagatgctgagaacgggcaataactttaccttcagctacaccttcgaggacgtgcctttccacagcagctacgcgcacagccagagcctggaccggctgatgaatcctctcatcgaccagtacctgtattacctgaacagaactcagaatcagtccggaagtgcccaaaacaaggacttgctgtttagccgggggtctccagctggcatgtctgttcagcccaaaaactggctacctggaccctgttaccggcagcagcgcgtttctaaaacaaaaacagacaacaacaacagcaactttacctggactggtgcttcaaaatataaccttaatgggcgtgaatctataatcaaccctggcactgctatggcctcacacaaagacgacaaagacaagttctttcccatgagcggtgtcatgatttttggaaaggagagcgccggagcttcaaacactgcattggacaatgtcatgatcacagacgaagaggaaatcaaagccactaaccccgtggccaccgaaagatttgggactgtggcagtcaatctccagagtgtacatcgattgttaatcaataaaccgtttaattcgtttcagttgaactttggtctctgcgtatttctttcttatctagtttccatggctacgtagataagtagcatggcgggttaatcattaactacaaggaacccctagtgatggagttggccactccctctctgcgcgctcgctcgctcactgaggccgggcgaccaaaggtcgcccgacgcccgggctttgcccgggcggcctcagtgagcgagcgagcgcgcagagagggagtggccaagcatgcaattaactggccgtcgttttacaacgtcgtgactgggaaaaccctggcgttacccaacttaatcgccttgcagcacatccccctttcgccagctgtatcagcacacaattgcccattatacgcgcgtataatggactattgtgtgctgata

SEQ ID NO: 23 - DNA, 4456 bp, synthetic construct
  misc_feature 1..4456: note = Description of Artificial Sequence: Synthetic polynucleotide
  source 1..4456: mol_type = other DNA
tatcagcacacaatagtccattatacgcgcgtataatgggcaattgtgtgctgatacagctggcacgacaggtttcccgactggaaagcgggcagtgagcgcaacgcaattaatgtgagttagctcactcattaggcaccccaggctttacactttatgcttccggctcgtatgttgtgtggaattgtgagcggataacaatttcacacaggaaacagctatgaccatgattacgccagatttaattaaggccttaattaggctagcttggccactccctctctgcgcgctcgctcgctcactgaggccgggcgaccaaaggtcgcccgacgcccgggctttgcccgggcggcctcagtgagcgagcgagcgcgcagagagggagtggccaactccatcactaggggttcctggaggggtggagtcgtgacgatatccatgcgtcgacataacgcgtgatctaacatatcctggtgtggagtagcggacgctgctatgacagaggctcgggggcctgagctggctctgtgagctggggaggaggcagacagccaggccttgtctgcaagcagacctggcagcattgggctggccgccccccagggcctcctcttcatgcccagtgaatgactcaccttggcacagacacaatgttcggggtgggcacagtgcctgcttcccgccgcaccccagcccccctcaaatgccttccgagaagcccattgagcagggggcttgcattgcaccccagcctgacagcctggcatcttgggataaaagcagcacagccccctaggggctgcccttgctgtgtggcgccaccggcggtggagaacaaggctctattcagcctgtgcccaggaaaggggatcaggggatgcccaggcatggacagtgggtggcagggggggagaggagggctgtctgcttcccagaagtccaaggacacaaatgggtgaggggagagctctccccatagctgggctgcggcccaaccccaccccctcaggctatgccagggggtgttgccaggggcacccgggcatcgccagtctagcccactccttcataaagccctcgcatcccaggagcgagcagagccagagcaggttggagaggagacgcatcacctccgctgctcgcggggatcctctagaagcttcgtttagtgaaccgtcagatcgcctggagacgccatccacgctgttttgacctccatagaagacaccgggaccgatccagcctccgcggattcgaatcccggccgggaacggtgcattggaacgcggattccccgtgccaagagtgacgtaagtaccgcctatagagtctataggcccacaaaaaatgctttcttcttttaatatacttttttgtttatcttatttctaatactttccctaatctctttctttcagggcaataatgatacaatgtatcatgcctctttgcaccattctaaagaataacagtgataatttctgggttaaggcaatagcaatatttctgcatataaatatttctgcatataaattgtaactgatgtaagaggtttcatattgctaatagcagctacaatccagctaccattctgcttttattttatggttgggataaggctggattattctgagtccaagctaggcccttttgctaatcatgttcatacctcttatcttcctcccacagctcctgggcaacgtgctggtctgtgtgctggcccatcactttggcaaagaattgggattcgaaccggtcgccaccggtcaccaagcaggaagtcaaagactttttccggtgggcaaaggatcacgtggttgaggtggagcatgaattctacgtcaaaaagggtggagccaagaaaagacccgcccccagtgacgcagatataagtgagcccaaacgggtgcgcgagtcagttgcgcagccatcgacgtcagacgcggaagcttcgatcaactacgcggacaggtaccaaaacaaatgttctcgtcacgtgggcatgaatctgatgctgtttccctgcagacaatgcgagagaatgaatcagaattcaaatatctgcttcactcacggacagaaagactgtttagagtgctttcccgtgtcagaatctcaacccgtttctgtcgtcaaaaaggcgtatcagaaactgtgctacattcatcatatcatgggaaaggtgccagacgcttgcactgcctgcgatctggtcaatgtggatttggatgactgcatctttgaacaataaatgatttaaatcaggtatggctgccgatggttatcttccagattggctcgaggacaacctctctgagggcattcgcgagtggtgggacttgaaacctggagccccgaaacccaaagccaaccagcaaaagcaggacgacggccggggtctggtgcttcctggctacaagtacctcggacccttcaacggactcgacaagggggagcccgtcaacgcggcggatgcagcggccctcgagcacgacaaggcctacgaccagcagctcaaagcgggtgacaatccgtacctgcggtataaccacgccgacgccgagtttcaggagcgtctgcaagaagatacgtcttttgggggcaacctcgggcgagcagtcttccaggccaagaagagggttctcgaaccttttggtctggttgaggaaggtgctaagacggctcctggaaagaaacgtccggtagagcagtcgccacaagagccagactcctcctcgggcattggcaagacaggccagcagcccgctaaaaagagactcaattttggtcagactggcgactcagagtcagtccccgacccacaacctctcggagaacctccagcaacccccgctgctgtgggacctactacaatggcttcaggcggtggcgcaccaatggcagacaataacgaaggcgccgacggagtgggtaatgcctcaggaaattggcattgcgattccacatggctgggcgacagagtcatcaccaccagcacccgaacatgggccttgcccacctataacaaccacctctacaagcaaatctccagtgcttcaacgggggccagcaacgacaaccactacttcggctacagcaccccctgggggtattttgatttcaacagattccactgccatttctcaccacgtgactggcagcgactcatcaacaacaattggggattccggcccaagagactcaacttcaagctcttcaacatccaagtcaaggaggtcacgacgaatgatggcgtcacgaccatcgctaataaccttaccagcacggttcaagtcttctcggactcggagtaccagttgccgtacgtcctcggctctgcgcaccagggctgcctccctccgttcccggcggacgtgttcatgattccgcagtacggctacctaacgctcaacaatggcagccaggcagtgggacggtcatccttttactgcctggaatatttcccatcgcagatgctgagaacgggcaataactttaccttcagctacaccttcgaggacgtgcctttccacagcagctacgcgcacagccagagcctggaccggctgatgaatcctctcatcgaccagtacctgtattacctgaacagaactcagaatcagtccggaagtgcccaaaacaaggacttgctgtttagccgggggtctccagctggcatgtctgttcagcccaaaaactggctacctggaccctgttaccggcagcagcgcgtttctaaaacaaaaacagacaacaacaacagcaactttacctggactggtgcttcaaaatataaccttaatgggcgtgaatctataatcaaccctggcactgctatggcctcacacaaagacgacaaagacaagttctttcccatgagcggtgtcatgatttttggaaaggagagcgccggagcttcaaacactgcattggacaatgtcatgatcacagacgaagaggaaatcaaagccactaaccccgtggccaccgaaagatttgggactgtggcagtcaatctccagagtgtacatcgattgttaatcaataaaccgtttaattcgtttcagttgaactttggtctctgcgtatttctttcttatctagtttccatggctacgtagataagtagcatggcgggttaatcattaactacaaggaacccctagtgatggagttggccactccctctctgcgcgctcgctcgctcactgaggccgggcgaccaaaggtcgcccgacgcccgggctttgcccgggcggcctcagtgagcgagcgagcgcgcagagagggagtggccaagcatgcaattaactggccgtcgttttacaacgtcgtgactgggaaaaccctggcgttacccaacttaatcgccttgcagcacatccccctttcgccagctgtatcagcacacaattgcccattatacgcgcgtataatggactattgtgtgctgata

SEQ ID NO: 24 - DNA, 4319 bp, synthetic construct
  misc_feature 1..4319: note = Description of Artificial Sequence: Synthetic polynucleotide
  source 1..4319: mol_type = other DNA
tatcagcacacaatagtccattatacgcgcgtataatgggcaattgtgtgctgatacagctggcacgacaggtttcccgactggaaagcgggcagtgagcgcaacgcaattaatgtgagttagctcactcattaggcaccccaggctttacactttatgcttccggctcgtatgttgtgtggaattgtgagcggataacaatttcacacaggaaacagctatgaccatgattacgccagatttaattaaggccttaattaggctagcttggccactccctctctgcgcgctcgctcgctcactgaggccgggcgaccaaaggtcgcccgacgcccgggctttgcccgggcggcctcagtgagcgagcgagcgcgcagagagggagtggccaactccatcactaggggttcctggaggggtggagtcgtgacgatatccatgcgtcgacataacgcgttagtatctgcagagggccctgcgtatgagtgcaagtgggttttaggaccaggatgaggcggggtgggggtgcctacctgacgaccgaccccgacccactggacaagcacccaacccccattccccaaattgcgcatcccctatcagagagggggaggggaaacaggatgcggcgaggcgcgtgcgcactgccagcttcagcaccgcggacagtgccttcgcccccgcctggcggcgcgcgccaccgccgcctcagcactgaaggcgcgctgacgtcactcgccggtcccccgcaaactccccttcccggccaccttggtcgcgtccgcgccgccgccggcccagccggaccgcaccacgcgaggcgcgagataggggggcacgggcgcgaccatctgcgctgcggcgccggcgactcagcgctgcctcagtctgcggtgggcagcggaggagtcgtgtcgtgcctgagagcgcagctgtgctcctgggcaccgcgcagtccgcccccgcggctcctggccagaccacccctaggaccccctgccccaagtcgcagccaagcttcgtttagtgaaccgtcagatcgcctggagacgccatccacgctgttttgacctccatagaagacaccgggaccgatccagcctccgcggattcgaatcccggccgggaacggtgcattggaacgcggattccccgtgccaagagtgacgtaagtaccgcctatagagtctataggcccacaaaaaatgctttcttcttttaatatacttttttgtttatcttatttctaatactttccctaatctctttctttcagggcaataatgatacaatgtatcatgcctctttgcaccattctaaagaataacagtgataatttctgggttaaggcaatagcaatatttctgcatataaatatttctgcatataaattgtaactgatgtaagaggtttcatattgctaatagcagctacaatccagctaccattctgcttttattttatggttgggataaggctggattattctgagtccaagctaggcccttttgctaatcatgttcatacctcttatcttcctcccacagctcctgggcaacgtgctggtctgtgtgctggcccatcactttggcaaagaattgggattcgaaccggtcgccaccggtcacaagcaggaagtcaaagactttttccggtgggcaaaggatcacgtggttgaggtggagcatgaattctacgtcaaaaagggtggagccaagaaaagacccgcccccagtgacgcagatataagtgagcccaaacgggtgcgcgagtcagttgcgcagccatcgacgtcagacgcggaagcttcgatcaactacgcggacaggtaccaaaacaaatgttctcgtcacgtgggcatgaatctgatgctgtttccctgcagacaatgcgagagaatgaatcagaattcaaatatctgcttcactcacggacagaaagactgtttagagtgctttcccgtgtcagaatctcaacccgtttctgtcgtcaaaaaggcgtatcagaaactgtgctacattcatcatatcatgggaaaggtgccagacgcttgcactgcctgcgatctggtcaatgtggatttggatgactgcatctttgaacaataaatgatttaaatcaggtatggctgccgatggttatcttccagattggctcgaggacactctctctgaaggaataagacagtggtggaagctcaaacctggcccaccaccaccaaagcccgcagagcggcataaggacgacagcaggggtcttgtgcttcctgggtacaagtacctcggacccttcaacggactcgacaagggagagccggtcaacgaggcagacgccgcggccctcgagcacgacaaagcctacgaccggcagctcgacagcggagacaacccgtacctcaagtacaaccacgccgacgccgagttccaggagcggctcaaagaagatacgtcttttgggggcaacctcgggcgagcagtcttccaggccaaaaagaggcttcttgaacctcttggtctggttgaggaagcggctaagacggctcctggaaagaagaggcctgtagagcactctcctgtggagccagactcctcctcgggaaccggaaaggcgggccagcagcctgcaagaaaaagattgaattttggtcagactggagacgcagactcagtcccagaccctcaaccaatcggagaacctcccgcagccccctcaggtgtgggatctcttacaatggctgcaggcggtggcgcaccaatggcagacaataacgagggcgccgacggagtgggtaattcctcgggaaattggcattgcgattccacatggatgggcgacagagtcatcaccaccagcacccgaacctgggccctgcccacctacaacaaccacctctacaagcaaatctccaacagcacatctggaggatcttcaaatgacaacgcctacttcggctacagcaccccctgggggtattttgactttaacagattccactgccacttttcaccacgtgactggcagcgactcatcaacaacaactggggattccggcccaagagactcagcttcaagctcttcaacatccaggtcaaggaggtcacgcagaatgaaggcaccaagaccatcgccaataacctcaccagcaccatccaggtgtttacggactcggagtaccagctgccgtacgttctcggctctgcccaccagggctgcctgcctccgttcccggcggacgtgttcatgattccccagtacggctacctaacactcaacaacggtagtcaggccgtgggacgctcctccttctactgcctggaatactttccttcgcagatgctgagaaccggcaacaacttccagtttacttacaccttcgaggacgtgcctttccacagcagctacgcccacagccagagcttggaccggctgatgaatcctctgattgaccagtacctgtactacttgtctcggactcaaacaacaggaggcacgacaaatacgcagactctgggcttcagccaaggtgggcctaatacaatggccaatcaggcaaagaactggctgccaggaccctgttaccgccagcagcgagtatcaaagacatctgcggataacaacaacagtgaatactcgtggactggagctaccaagtaccacctcaatggcagagactctctggtgaatccgggcccggccatggcaagccacaaggacgatgaagaaaagttttttcctcagagcggggttctcatctttgggaagcaaggctcagagaaaacaaatgtggacattgaaaaggtcatgattacagacgaagaggaaatcaggacaaccaatcccgtggctacggagcagtatggttctgtatctaccaacctccagcaaggtgtacatcgattgttaatcaataaaccgtttaattcgtttcagttgaactttggtctctgcgtatttctttcttatctagtttccatggctacgtagataagtagcatggcgggttaatcattaactacaaggaacccctagtgatggagttggccactccctctctgcgcgctcgctcgctcactgaggccgggcgaccaaaggtcgcccgacgcccgggctttgcccgggcggcctcagtgagcgagcgagcgcgcagagagggagtggccaagcatgcaattaactggccgtcgttttacaacgtcgtgactgggaaaaccctggcgttacccaacttaatcgccttgcagcacatccccctttcgccagctgtatcagcacacaattgcccattatacgcgcgtataatggactattgtgtgctgata

SEQ ID NO: 25 - DNA, 4462 bp, synthetic construct
  misc_feature 1..4462: note = Description of Artificial Sequence: Synthetic polynucleotide
  source 1..4462: mol_type = other DNA
tatcagcacacaatagtccattatacgcgcgtataatgggcaattgtgtgctgatacagctggcacgacaggtttcccgactggaaagcgggcagtgagcgcaacgcaattaatgtgagttagctcactcattaggcaccccaggctttacactttatgcttccggctcgtatgttgtgtggaattgtgagcggataacaatttcacacaggaaacagctatgaccatgattacgccagatttaattaaggccttaattaggctagcttggccactccctctctgcgcgctcgctcgctcactgaggccgggcgaccaaaggtcgcccgacgcccgggctttgcccgggcggcctcagtgagcgagcgagcgcgcagagagggagtggccaactccatcactaggggttcctggaggggtggagtcgtgacgatatccatgcgtcgacataacgcgtgatctaacatatcctggtgtggagtagcggacgctgctatgacagaggctcgggggcctgagctggctctgtgagctggggaggaggcagacagccaggccttgtctgcaagcagacctggcagcattgggctggccgccccccagggcctcctcttcatgcccagtgaatgactcaccttggcacagacacaatgttcggggtgggcacagtgcctgcttcccgccgcaccccagcccccctcaaatgccttccgagaagcccattgagcagggggcttgcattgcaccccagcctgacagcctggcatcttgggataaaagcagcacagccccctaggggctgcccttgctgtgtggcgccaccggcggtggagaacaaggctctattcagcctgtgcccaggaaaggggatcaggggatgcccaggcatggacagtgggtggcagggggggagaggagggctgtctgcttcccagaagtccaaggacacaaatgggtgaggggagagctctccccatagctgggctgcggcccaaccccaccccctcaggctatgccagggggtgttgccaggggcacccgggcatcgccagtctagcccactccttcataaagccctcgcatcccaggagcgagcagagccagagcaggttggagaggagacgcatcacctccgctgctcgcggggatcctctagaagcttcgtttagtgaaccgtcagatcgcctggagacgccatccacgctgttttgacctccatagaagacaccgggaccgatccagcctccgcggattcgaatcccggccgggaacggtgcattggaacgcggattccccgtgccaagagtgacgtaagtaccgcctatagagtctataggcccacaaaaaatgctttcttcttttaatatacttttttgtttatcttatttctaatactttccctaatctctttctttcagggcaataatgatacaatgtatcatgcctctttgcaccattctaaagaataacagtgataatttctgggttaaggcaatagcaatatttctgcatataaatatttctgcatataaattgtaactgatgtaagaggtttcatattgctaatagcagctacaatccagctaccattctgcttttattttatggttgggataaggctggattattctgagtccaagctaggcccttttgctaatcatgttcatacctcttatcttcctcccacagctcctgggcaacgtgctggtctgtgtgctggcccatcactttggcaaagaattgggattcgaaccggtcgccaccggtcaccaagcaggaagtcaaagactttttccggtgggcaaaggatcacgtggttgaggtggagcatgaattctacgtcaaaaagggtggagccaagaaaagacccgcccccagtgacgcagatataagtgagcccaaacgggtgcgcgagtcagttgcgcagccatcgacgtcagacgcggaagcttcgatcaactacgcggacaggtaccaaaacaaatgttctcgtcacgtgggcatgaatctgatgctgtttccctgcagacaatgcgagagaatgaatcagaattcaaatatctgcttcactcacggacagaaagactgtttagagtgctttcccgtgtcagaatctcaacccgtttctgtcgtcaaaaaggcgtatcagaaactgtgctacattcatcatatcatgggaaaggtgccagacgcttgcactgcctgcgatctggtcaatgtggatttggatgactgcatctttgaacaataaatgatttaaatcaggtatggctgccgatggttatcttccagattggctcgaggacactctctctgaaggaataagacagtggtggaagctcaaacctggcccaccaccaccaaagcccgcagagcggcataaggacgacagcaggggtcttgtgcttcctgggtacaagtacctcggacccttcaacggactcgacaagggagagccggtcaacgaggcagacgccgcggccctcgagcacgacaaagcctacgaccggcagctcgacagcggagacaacccgtacctcaagtacaaccacgccgacgccgagttccaggagcggctcaaagaagatacgtcttttgggggcaacctcgggcgagcagtcttccaggccaaaaagaggcttcttgaacctcttggtctggttgaggaagcggctaagacggctcctggaaagaagaggcctgtagagcactctcctgtggagccagactcctcctcgggaaccggaaaggcgggccagcagcctgcaagaaaaagattgaattttggtcagactggagacgcagactcagtcccagaccctcaaccaatcggagaacctcccgcagccccctcaggtgtgggatctcttacaatggctgcaggcggtggcgcaccaatggcagacaataacgagggcgccgacggagtgggtaattcctcgggaaattggcattgcgattccacatggatgggcgacagagtcatcaccaccagcacccgaacctgggccctgcccacctacaacaaccacctctacaagcaaatctccaacagcacatctggaggatcttcaaatgacaacgcctacttcggctacagcaccccctgggggtattttgactttaacagattccactgccacttttcaccacgtgactggcagcgactcatcaacaacaactggggattccggcccaagagactcagcttcaagctcttcaacatccaggtcaaggaggtcacgcagaatgaaggcaccaagaccatcgccaataacctcaccagcaccatccaggtgtttacggactcggagtaccagctgccgtacgttctcggctctgcccaccagggctgcctgcctccgttcccggcggacgtgttcatgattccccagtacggctacctaacactcaacaacggtagtcaggccgtgggacgctcctccttctactgcctggaatactttccttcgcagatgctgagaaccggcaacaacttccagtttacttacaccttcgaggacgtgcctttccacagcagctacgcccacagccagagcttggaccggctgatgaatcctctgattgaccagtacctgtactacttgtctcggactcaaacaacaggaggcacgacaaatacgcagactctgggcttcagccaaggtgggcctaatacaatggccaatcaggcaaagaactggctgccaggaccctgttaccgccagcagcgagtatcaaagacatctgcggataacaacaacagtgaatactcgtggactggagctaccaagtaccacctcaatggcagagactctctggtgaatccgggcccggccatggcaagccacaaggacgatgaagaaaagttttttcctcagagcggggttctcatctttgggaagcaaggctcagagaaaacaaatgtggacattgaaaaggtcatgattacagacgaagaggaaatcaggacaaccaatcccgtggctacggagcagtatggttctgtatctaccaacctccagcaaggtgtacatcgattgttaatcaataaaccgtttaattcgtttcagttgaactttggtctctgcgtatttctttcttatctagtttccatggctacgtagataagtagcatggcgggttaatcattaactacaaggaacccctagtgatggagttggccactccctctctgcgcgctcgctcgctcactgaggccgggcgaccaaaggtcgcccgacgcccgggctttgcccgggcggcctcagtgagcgagcgagcgcgcagagagggagtggccaagcatgcaattaactggccgtcgttttacaacgtcgtgactgggaaaaccctggcgttacccaacttaatcgccttgcagcacatccccctttcgccagctgtatcagcacacaattgcccattatacgcgcgtataatggactattgtgtgctgata

SEQ ID NO: 26 - DNA, 20 bp, synthetic construct
  misc_feature 1..20: note = Description of Artificial Sequence: Synthetic oligonucleotide
  source 1..20: mol_type = other DNA
ccgtgccaagagtgacctcc

SEQ ID NO: 27 - DNA, 51 bp, synthetic construct
  misc_difference 16..17: note = a, c, t, g, unknown or other
  misc_difference 19..20: note = a, c, t, g, unknown or other
  misc_difference 22..23: note = a, c, t, g, unknown or other
  misc_difference 25..26: note = a, c, t, g, unknown or other
  misc_difference 28..29: note = a, c, t, g, unknown or other
  misc_difference 31..32: note = a, c, t, g, unknown or other
  misc_difference 34..35: note = a, c, t, g, unknown or other
  misc_feature 1..51: note = Description of Artificial Sequence: Synthetic oligonucleotide
  source 1..51: mol_type = other DNA
  CDS 1..51
ctccagagtagcagcnnknnknnknnknnknnknnkacagaccctgcgacc

SEQ ID NO: 28 - protein, 17 aa, synthetic construct
  VARIANT 6..12: note = Any naturally occurring amino acid
  REGION 1..17: note = Description of Artificial Sequence: Synthetic peptide
LQSSSXXXXXXXTDPAT

SEQ ID NO: 29 - DNA, 51 bp, synthetic construct
  misc_difference 16..17: note = a, c, t, g, unknown or other
  misc_difference 19..20: note = a, c, t, g, unknown or other
  misc_difference 22..23: note = a, c, t, g, unknown or other
  misc_difference 25..26: note = a, c, t, g, unknown or other
  misc_difference 28..29: note = a, c, t, g, unknown or other
  misc_difference 31..32: note = a, c, t, g, unknown or other
  misc_difference 34..35: note = a, c, t, g, unknown or other
  misc_feature 1..51: note = Description of Artificial Sequence: Synthetic oligonucleotide
  source 1..51: mol_type = other DNA
  CDS 1..51
aaccagagctctaccnnknnknnknnknnknnknnkactgcccccgcgacc

SEQ ID NO: 30 - protein, 17 aa, synthetic construct
  VARIANT 6..12: note = Any naturally occurring amino acid
  REGION 1..17: note = Description of Artificial Sequence: Synthetic peptide
NQSSTXXXXXXXTAPAT

SEQ ID NO: 31 - DNA, 51 bp, synthetic construct
  misc_difference 16..17: note = a, c, t, g, unknown or other
  misc_difference 19..20: note = a, c, t, g, unknown or other
  misc_difference 22..23: note = a, c, t, g, unknown or other
  misc_difference 25..26: note = a, c, t, g, unknown or other
  misc_difference 28..29: note = a, c, t, g, unknown or other
  misc_difference 31..32: note = a, c, t, g, unknown or other
  misc_difference 34..35: note = a, c, t, g, unknown or other
  misc_feature 1..51: note = Description of Artificial Sequence: Synthetic oligonucleotide
  source 1..51: mol_type = other DNA
  CDS 1..51
ctccagcaaggtaacnnknnknnknnknnknnknnkacacaagcagctacc

SEQ ID NO: 32 - protein, 17 aa, synthetic construct
  VARIANT 6..12: note = Any naturally occurring amino acid
  REGION 1..17: note = Description of Artificial Sequence: Synthetic peptide
LQQGNXXXXXXXTQAAT

SEQ ID NO: 33 - DNA, 30 bp, synthetic construct
  misc_feature 1..30: note = Description of Artificial Sequence: Synthetic oligonucleotide
  source 1..30: mol_type = other DNA
  CDS 1..30
caccagagtgcccaagcacaggcgcagacc

SEQ ID NO: 34 - protein, 10 aa, synthetic construct
  REGION 1..10: note = Description of Artificial Sequence: Synthetic peptide
HQSAQAQAQT

SEQ ID NO: 35 - DNA, 51 bp, synthetic construct
  misc_feature 1..51: note = Description of Artificial Sequence: Synthetic oligonucleotide
  source 1..51: mol_type = other DNA
  CDS 1..51
caccagagtgatgggactttggcggtgccttttaaggcacaggcgcagacc

SEQ ID NO: 36 - protein, 17 aa, synthetic construct
  REGION 1..17: note = Description of Artificial Sequence: Synthetic peptide
HQSDGTLAVPFKAQAQT

SEQ ID NO: 37 - DNA, 51 bp, synthetic construct
  misc_difference 16..17: note = a, c, t, g, unknown or other
  misc_difference 19..20: note = a, c, t, g, unknown or other
  misc_difference 22..23: note = a, c, t, g, unknown or other
  misc_difference 25..26: note = a, c, t, g, unknown or other
  misc_difference 28..29: note = a, c, t, g, unknown or other
  misc_difference 31..32: note = a, c, t, g, unknown or other
  misc_difference 34..35: note = a, c, t, g, unknown or other
  misc_feature 1..51: note = Description of Artificial Sequence: Synthetic oligonucleotide
  source 1..51: mol_type = other DNA
  CDS 1..51
caccagagtgcccaannknnknnknnknnknnknnkgcacaggcgcagacc

SEQ ID NO: 38 - protein, 17 aa, synthetic construct
  VARIANT 6..12: note = Any naturally occurring amino acid
  REGION 1..17: note = Description of Artificial Sequence: Synthetic peptide
HQSAQXXXXXXXAQAQT

SEQ ID NO: 39 - DNA, 51 bp, synthetic construct
  misc_difference 16..17: note = a, c, t, g, unknown or other
  misc_difference 19..20: note = a, c, t, g, unknown or other
  misc_difference 22..23: note = a, c, t, g, unknown or other
  misc_difference 25..26: note = a, c, t, g, unknown or other
  misc_difference 28..29: note = a, c, t, g, unknown or other
  misc_difference 31..32: note = a, c, t, g, unknown or other
  misc_difference 34..35: note = a, c, t, g, unknown or other
  misc_feature 1..51: note = Description of Artificial Sequence: Synthetic oligonucleotide
  source 1..51: mol_type = other DNA
  CDS 1..51
caccagagtgatgggnnknnknnknnknnknnknnkgcacaggcgcagacc

SEQ ID NO: 40 - protein, 17 aa, synthetic construct
  VARIANT 6..12: note = Any naturally occurring amino acid
  REGION 1..17: note = Description of Artificial Sequence: Synthetic peptide
HQSDGXXXXXXXAQAQT

SEQ ID NO: 41 - DNA, 51 bp, synthetic construct
  misc_difference 19..20: note = a, c, t, g, unknown or other
  misc_difference 22..23: note = a, c, t, g, unknown or other
  misc_difference 25..26: note = a, c, t, g, unknown or other
  misc_difference 28..29: note = a, c, t, g, unknown or other
  misc_difference 31..32: note = a, c, t, g, unknown or other
  misc_difference 34..35: note = a, c, t, g, unknown or other
  misc_feature 1..51: note = Description of Artificial Sequence: Synthetic oligonucleotide
  source 1..51: mol_type = other DNA
  CDS 1..51
caccagagtgatggcaccnnknnknnknnknnknnkgcacaggcgcagacc

SEQ ID NO: 42 - protein, 17 aa, synthetic construct
  VARIANT 7..12: note = Any naturally occurring amino acid
  REGION 1..17: note = Description of Artificial Sequence: Synthetic peptide
HQSDGTXXXXXXAQAQT

SEQ ID NO: 43 - DNA, 45 bp, synthetic construct
  misc_feature 1..45: note = Description of Artificial Sequence: Synthetic oligonucleotide
  source 1..45: mol_type = other DNA
gccaccaacaaccagagctctgtacatcgattgttaatcaataaa

SEQ ID NO: 44 - DNA, 45 bp, synthetic construct
  misc_feature 1..45: note = Description of Artificial Sequence: Synthetic oligonucleotide
  source 1..45: mol_type = other DNA
gtggcagtcaatctccagagtgtacatcgattgttaatcaataaa

SEQ ID NO: 45 - DNA, 45 bp, synthetic construct
  misc_feature 1..45: note = Description of Artificial Sequence: Synthetic oligonucleotide
  source 1..45: mol_type = other DNA
tctaccaacctccagcaaggtgtacatcgattgttaatcaataaa

SEQ ID NO: 46 - DNA, 45 bp, synthetic construct
  misc_feature 1..45: note = Description of Artificial Sequence: Synthetic oligonucleotide
  source 1..45: mol_type = other DNA
gtggccacaaaccaccagagtgtacatcgattgttaatcaataaa

SEQ ID NO: 47 - skipped

SEQ ID NO: 48 - DNA, 71 bp, synthetic construct
  misc_difference 31..32: note = a, c, t, g, unknown or other
  misc_difference 34..35: note = a, c, t, g, unknown or other
  misc_difference 37..38: note = a, c, t, g, unknown or other
  misc_difference 40..41: note = a, c, t, g, unknown or other
  misc_difference 43..44: note = a, c, t, g, unknown or other
  misc_difference 46..47: note = a, c, t, g, unknown or other
  misc_difference 49..50: note = a, c, t, g, unknown or other
  misc_feature 1..71: note = Description of Artificial Sequence: Synthetic oligonucleotide
  source 1..71: mol_type = other DNA
  CDS 1..69
caagtggccacaaaccaccagagtgcccaannknnknnknnknnknnknnkgcacaggcgcagaccggctg

SEQ ID NO: 49 - protein, 23 aa, synthetic construct
  VARIANT 11..17: note = Any naturally occurring amino acid
  REGION 1..23: note = Description of Artificial Sequence: Synthetic peptide
QVATNHQSAQXXXXXXXAQAQTG

SEQ ID NO: 50 - DNA, 69 bp, synthetic construct
  misc_difference 31..32: note = a, c, t, g, unknown or other
  misc_difference 34..35: note = a, c, t, g, unknown or other
  misc_difference 37..38: note = a, c, t, g, unknown or other
  misc_difference 40..41: note = a, c, t, g, unknown or other
  misc_difference 43..44: note = a, c, t, g, unknown or other
  misc_difference 46..47: note = a, c, t, g, unknown or other
  misc_difference 49..50: note = a, c, t, g, unknown or other
  misc_feature 1..69: note = Description of Artificial Sequence: Synthetic oligonucleotide
  source 1..69: mol_type = other DNA
  CDS 1..69
caggtcgctaccaatcatcaatccgcacagnnknnknnknnknnknnknnkgctcaagcacaaacagga

SEQ ID NO: 51 - DNA, 24 bp, synthetic construct
  misc_feature 1..24: note = Description of Artificial Sequence: Synthetic oligonucleotide
  source 1..24: mol_type = other DNA
caagtggccacaaaccaccagagt

SEQ ID NO: 52 - DNA, 21 bp, synthetic construct
  misc_feature 1..21: note = Description of Artificial Sequence: Synthetic oligonucleotide
  source 1..21: mol_type = other DNA
caggtcgctaccaatcatcaa

SEQ ID NO: 53 - DNA, 24 bp, synthetic construct
  misc_feature 1..24: note = Description of Artificial Sequence: Synthetic oligonucleotide
  source 1..24: mol_type = other DNA
agtgcccaagcacaggcgcagacc

SEQ ID NO: 54 - DNA, 24 bp, synthetic construct
  misc_feature 1..24: note = Description of Artificial Sequence: Synthetic oligonucleotide
  source 1..24: mol_type = other DNA
agtgctcaggcacaggcgcagacc

SEQ ID NO: 55 - DNA, 27 bp, synthetic construct
  misc_feature 1..27: note = Description of Artificial Sequence: Synthetic oligonucleotide
  source 1..27: mol_type = other DNA
gacggaacactcgcagtcccattcaaa

SEQ ID NO: 56 - DNA, 27 bp, synthetic construct
  misc_feature 1..27: note = Description of Artificial Sequence: Synthetic oligonucleotide
  source 1..27: mol_type = other DNA
gatgggactttggcggtgccttttaag

SEQ ID NO: 57 - DNA, 27 bp, synthetic construct
  misc_feature 1..27: note = Description of Artificial Sequence: Synthetic oligonucleotide
  source 1..27: mol_type = other DNA
gcacaaacactcgcagtcccattcaaa

SEQ ID NO: 58 - DNA, 27 bp, synthetic construct
  misc_feature 1..27: note = Description of Artificial Sequence: Synthetic oligonucleotide
  source 1..27: mol_type = other DNA
gcccaaactttggcggtgccttttaag

SEQ ID NO: 59 - protein, 9 aa, synthetic construct
  REGION 1..9: note = Description of Artificial Sequence: Synthetic peptide
DGTSSYYDS

SEQ ID NO: 60 - protein, 9 aa, synthetic construct
  REGION 1..9: note = Description of Artificial Sequence: Synthetic peptide
AQPEGSARW

SEQ ID NO: 61 - protein, 9 aa, synthetic construct
  REGION 1..9: note = Description of Artificial Sequence: Synthetic peptide
DGTASYYDS

SEQ ID NO: 62 - protein, 9 aa, synthetic construct
  REGION 1..9: note = Description of Artificial Sequence: Synthetic peptide
AQWPTSYDA

SEQ ID NO: 63 - protein, 9 aa, synthetic construct
  REGION 1..9: note = Description of Artificial Sequence: Synthetic peptide
DGTADKPFR

SEQ ID NO: 64 - protein, 9 aa, synthetic construct
  REGION 1..9: note = Description of Artificial Sequence: Synthetic peptide
DGSSSYYDA

SEQ ID NO: 65 - protein, 9 aa, synthetic construct
  REGION 1..9: note = Description of Artificial Sequence: Synthetic peptide
DGTLSQPFR

SEQ ID NO: 66 - protein, 9 aa, synthetic construct
  REGION 1..9: note = Description of Artificial Sequence: Synthetic peptide
AQFPTNYDS

SEQ ID NO: 67 - protein, 9 aa, synthetic construct
  REGION 1..9: note = Description of Artificial Sequence: Synthetic peptide
DGTAIHLSS

SEQ ID NO: 68 - protein, 9 aa, synthetic construct
  REGION 1..9: note = Description of Artificial Sequence: Synthetic peptide
DGTGQVTGW

SEQ ID NO: 69 - protein, 9 aa, synthetic construct
  REGION 1..9: note = Description of Artificial Sequence: Synthetic peptide
DGTGNVTGW

SEQ ID NO: 70 - protein, 9 aa, synthetic construct
  REGION 1..9: note = Description of Artificial Sequence: Synthetic peptide
DGTMDKPFR

SEQ ID NO: 71 - protein, 9 aa, synthetic construct
  REGION 1..9: note = Description of Artificial Sequence: Synthetic peptide
DGTLAVPFK

SEQ ID NO: 72 - protein, 9 aa, synthetic construct
  REGION 1..9: note = Description of Artificial Sequence: Synthetic peptide
DGTGNTHGW

SEQ ID NO: 73 - protein, 9 aa, synthetic construct
  REGION 1..9: note = Description of Artificial Sequence: Synthetic peptide
DGTVIHLSS

SEQ ID NO: 74 - protein, 9 aa, synthetic construct
  REGION 1..9: note = Description of Artificial Sequence: Synthetic peptide
DGTGTTVGW

SEQ ID NO: 75 - protein, 9 aa, synthetic construct
  REGION 1..9: note = Description of Artificial Sequence: Synthetic peptide
DGTTYVPPR

SEQ ID NO: 76 - protein, 9 aa, synthetic construct
  REGION 1..9: note = Description of Artificial Sequence: Synthetic peptide
DGTNGLKGW

SEQ ID NO: 77 - protein, 9 aa, synthetic construct
  REGION 1..9: note = Description of Artificial Sequence: Synthetic peptide
DGTTTYGAR

SEQ ID NO: 78 - protein, 9 aa, synthetic construct
  REGION 1..9: note = Description of Artificial Sequence: Synthetic peptide
DGTSYVPPR

SEQ ID NO: 79 - protein, 9 aa, synthetic construct
  REGION 1..9: note = Description of Artificial Sequence: Synthetic peptide
DGTTFTPPR

SEQ ID NO: 80 - protein, 9 aa, synthetic construct
  REGION 1..9: note = Description of Artificial Sequence: Synthetic peptide
AQGSWNPPA

SEQ ID NO: 81 - protein, 9 aa, synthetic construct
  REGION 1..9: note = Description of Artificial Sequence: Synthetic peptide
DGTSFTPPK

SEQ ID NO: 82 - protein, 9 aa, synthetic construct
  REGION 1..9: note = Description of Artificial Sequence: Synthetic peptide
AQGTWNPPA

SEQ ID NO: 83 - protein, 9 aa, synthetic construct
  REGION 1..9: note = Description of Artificial Sequence: Synthetic peptide
AQTTEKPWL

SEQ ID NO: 84 - protein, 9 aa, synthetic construct
  REGION 1..9: note = Description of Artificial Sequence: Synthetic peptide
AQNGNPGRW

SEQ ID NO: 85 - protein, 9 aa, synthetic construct
  REGION 1..9: note = Description of Artificial Sequence: Synthetic peptide
AQTTDRPFL

SEQ ID NO: 86 - protein, 9 aa, synthetic construct
  REGION 1..9: note = Description of Artificial Sequence: Synthetic peptide
DGTSFPYAR

SEQ ID NO: 87 - protein, 9 aa, synthetic construct
  REGION 1..9: note = Description of Artificial Sequence: Synthetic peptide
DGTIERPFR

SEQ ID NO: 88 - protein, 9 aa, synthetic construct
  REGION 1..9: note = Description of Artificial Sequence: Synthetic peptide
DGTSFTPPR

SEQ ID NO: 89 - protein, 9 aa, synthetic construct
  REGION 1..9: note = Description of Artificial Sequence: Synthetic peptide
DGTLQQPFR

SEQ ID NO: 90 - protein, 9 aa, synthetic construct
  REGION 1..9: note = Description of Artificial Sequence: Synthetic peptide
DGTHTRTGW

SEQ ID NO: 91 - protein, 9 aa, synthetic construct
  REGION 1..9: note = Description of Artificial Sequence: Synthetic peptide
AQGGNPGRW

SEQ ID NO: 92 - protein, 9 aa, synthetic construct
  REGION 1..9: note = Description of Artificial Sequence: Synthetic peptide
DGKQYQLSS

SEQ ID NO: 93 - protein, 9 aa, synthetic construct
  REGION 1..9: note = Description of Artificial Sequence: Synthetic peptide
AQTREYLLG

SEQ ID NO: 94 - protein, 9 aa, synthetic construct
  REGION 1..9: note = Description of Artificial Sequence: Synthetic peptide
DGTGNTRGW

SEQ ID NO: 95 - protein, 9 aa, synthetic construct
  REGION 1..9: note = Description of Artificial Sequence: Synthetic peptide
AQFVVGQQY

SEQ ID NO: 96 - protein, 9 aa, synthetic construct
  REGION 1..9: note = Description of Artificial Sequence: Synthetic peptide
AQGENPGRW

SEQ ID NO: 97 - protein, 9 aa, synthetic construct
  REGION 1..9: note = Description of Artificial Sequence: Synthetic peptide
DGTSYVPPK

SEQ ID NO: 98 - protein, 9 aa, synthetic construct
  REGION 1..9: note = Description of Artificial Sequence: Synthetic peptide
AQTLARPFV

SEQ ID NO: 99 - protein, 9 aa, synthetic construct
  REGION 1..9: note = Description of Artificial Sequence: Synthetic peptide
DGSTERPFR

SEQ ID NO: 100 - protein, 9 aa, synthetic construct
  REGION 1..9: note = Description of Artificial Sequence: Synthetic peptide
AQTSARPFL

SEQ ID NO: 101 - protein, 9 aa, synthetic construct
  REGION 1..9: note = Description of Artificial Sequence: Synthetic peptide
DGTSGLKGW

SEQ ID NO: 102 - protein, 9 aa, synthetic construct
  REGION 1..9: note = Description of Artificial Sequence: Synthetic peptide
DGTMDRPFK

SEQ ID NO: 103 - protein, 9 aa, synthetic construct
  REGION 1..9: note = Description of Artificial Sequence: Synthetic peptide
AQGSNPGRW

SEQ ID NO: 104 - protein, 9 aa, synthetic construct
  REGION 1..9: note = Description of Artificial Sequence: Synthetic peptide
DGVHPGLSS

SEQ ID NO: 105 - protein, 9 aa, synthetic construct
  REGION 1..9: note = Description of Artificial Sequence: Synthetic peptide
DGTISQPFK

SEQ ID NO: 106 - protein, 9 aa, synthetic construct
  REGION 1..9: note = Description of Artificial Sequence: Synthetic peptide
DGTRTTTGW

SEQ ID NO: 107 - protein, 9 aa, synthetic construct
  REGION 1..9: note = Description of Artificial Sequence: Synthetic peptide
DGTGGTKGW

SEQ ID NO: 108 - protein, 9 aa, synthetic construct
  REGION 1..9: note = Description of Artificial Sequence: Synthetic peptide
DGTQFSPPR

SEQ ID NO: 109 - protein, 9 aa, synthetic construct
  REGION 1..9: note = Description of Artificial Sequence: Synthetic peptide
DGTLNNPFR

SEQ ID NO: 110 - protein, 9 aa, synthetic construct
  REGION 1..9: note = Description of Artificial Sequence: Synthetic peptide
DGQHFAPPR

SEQ ID NO: 111 - protein, 9 aa, synthetic construct
  REGION 1..9: note = Description of Artificial Sequence: Synthetic peptide
DGTKIRLSS

SEQ ID NO: 112 - protein, 9 aa, synthetic construct
  REGION 1..9: note = Description of Artificial Sequence: Synthetic peptide
DGTHFAPPR

SEQ ID NO: 113 - protein, 9 aa, synthetic construct
  REGION 1..9: note = Description of Artificial Sequence: Synthetic peptide
DGTNTTHGW

SEQ ID NO: 114 - protein, 9 aa, synthetic construct
  REGION 1..9: note = Description of Artificial Sequence: Synthetic peptide
DGSGTTRGW

SEQ ID NO: 115 - protein, 9 aa, synthetic construct
  REGION 1..9: note = Description of Artificial Sequence: Synthetic peptide
AQLKYGLAQ

SEQ ID NO: 116 - protein, 9 aa, synthetic construct
  REGION 1..9: note = Description of Artificial Sequence: Synthetic peptide
DGTTLVPPR

SEQ ID NO: 117 - protein, 9 aa, synthetic construct
  REGION 1..9: note = Description of Artificial Sequence: Synthetic peptide
DGTGRTVGW

SEQ ID NO: 118 - protein, 9 aa, synthetic construct
  REGION 1..9: note = Description of Artificial Sequence: Synthetic peptide
DGTKLRLSS

SEQ ID NO: 119 - protein, 9 aa, synthetic construct
  REGION 1..9: note = Description of Artificial Sequence: Synthetic peptide
DGTGSTHGW

SEQ ID NO: 120 - protein, 9 aa, synthetic construct
  REGION 1..9: note = Description of Artificial Sequence: Synthetic peptide
DGTLAAPFK

SEQ ID NO: 121 - protein, 9 aa, synthetic construct
  REGION 1..9: note = Description of Artificial Sequence: Synthetic peptide
DGTLLRLSS

SEQ ID NO: 122 - protein, 9 aa, synthetic construct
  REGION 1..9: note = Description of Artificial Sequence: Synthetic peptide
DGTKVLVQL

SEQ ID NO: 123 - protein, 9 aa, synthetic construct
  REGION 1..9: note = Description of Artificial Sequence: Synthetic peptide
AQLRVGFAQ

SEQ ID NO: 124 - protein, 9 aa, synthetic construct
  REGION 1..9: note = Description of Artificial Sequence: Synthetic peptide
DGTNTINGW

SEQ ID NO: 125 - protein, 9 aa, synthetic construct
  REGION 1..9: note = Description of Artificial Sequence: Synthetic peptide
AQGPTRPFL

SEQ ID NO: 126 - protein, 9 aa, synthetic construct
  REGION 1..9: note = Description of Artificial Sequence: Synthetic peptide
AQTRAGYAQ

SEQ ID NO: 127 - protein, 9 aa, synthetic construct
  REGION 1..9: note = Description of Artificial Sequence: Synthetic peptide
DGSSFYPPK

SEQ ID NO: 128 - protein, 9 aa, synthetic construct
  REGION 1..9: note = Description of Artificial Sequence: Synthetic peptide
AQGSDVGRW

SEQ ID NO: 129 - protein, 9 aa, synthetic construct
  REGION 1..9: note = Description of Artificial Sequence: Synthetic peptide
DGTQFRLSS

SEQ ID NO: 130 - protein, 9 aa, synthetic construct
  REGION 1..9: note = Description of Artificial Sequence: Synthetic peptide
DGTGTTTGW

SEQ ID NO: 131 - protein, 9 aa, synthetic construct
  REGION 1..9: note = Description of Artificial Sequence: Synthetic peptide
DGTGGIKGW

SEQ ID NO: 132 - protein, 9 aa, synthetic construct
  REGION 1..9: note = Description of Artificial Sequence: Synthetic peptide
DGTAARLSS

SEQ ID NO: 133 - protein, 9 aa, synthetic construct
  REGION 1..9: note = Description of Artificial Sequence: Synthetic peptide
DGTGNLRGW

SEQ ID NO: 134 - protein, 9 aa, synthetic construct
  REGION 1..9: note = Description of Artificial Sequence: Synthetic peptide
DGTGSTTGW

SEQ ID NO: 135 - protein, 9 aa, synthetic construct
  REGION 1..9: note = Description of Artificial Sequence: Synthetic peptide
DGTRNMYEG

SEQ ID NO: 136 - protein, 9 aa, synthetic construct
  REGION 1..9: note = Description of Artificial Sequence: Synthetic peptide
DGSQSTTGW

SEQ ID NO: 137 - protein, 9 aa, synthetic construct
  REGION 1..9: note = Description of Artificial Sequence: Synthetic peptide
DGTGNTSGW

SEQ ID NO: 138 - protein, 9 aa, synthetic construct
  REGION 1..9: note = Description of Artificial Sequence: Synthetic peptide
AQRYTGDSS

SEQ ID NO: 139 - protein, 9 aa, synthetic construct
  REGION 1..9: note = Description of Artificial Sequence: Synthetic peptide
DGTTWTPPR

SEQ ID NO: 140 - protein, 9 aa, synthetic construct
  REGION 1..9: note = Description of Artificial Sequence: Synthetic peptide
DGTAERPFR

SEQ ID NO: 141 - protein, 9 aa, synthetic construct
  REGION 1..9: note = Description of Artificial Sequence: Synthetic peptide
AQTRAGYSQ

SEQ ID NO: 142 - protein, 9 aa, synthetic construct
  REGION 1..9: note = Description of Artificial Sequence: Synthetic peptide
DGTKMVLQL

SEQ ID NO: 143 - protein, 9 aa, synthetic construct
  REGION 1..9: note = Description of Artificial Sequence: Synthetic peptide
DGTNSTTGW

SEQ ID NO: 144 - protein, 9 aa, synthetic construct
  REGION 1..9: note = Description of Artificial Sequence: Synthetic peptide
AQELTRPFL

SEQ ID NO: 145 - protein, 9 aa, synthetic construct
  REGION 1..9: note = Description of Artificial Sequence: Synthetic peptide
DGTHSTTGW

SEQ ID NO: 146 - protein, 9 aa, synthetic construct
  REGION 1..9: note = Description of Artificial Sequence: Synthetic peptide
DGTKIQLSS

SEQ ID NO: 147 - protein, 9 aa, synthetic construct
  REGION 1..9: note = Description of Artificial Sequence: Synthetic peptide
DGSGRTTGW

SEQ ID NO: 148 - protein, 9 aa, synthetic construct
  REGION 1..9: note = Description of Artificial Sequence: Synthetic peptide
DGTMLRLSS

SEQ ID NO: 149 - protein, 9 aa, synthetic construct
  REGION 1..9: note = Description of Artificial Sequence: Synthetic peptide
AQGASPGRW

SEQ ID NO: 150 - protein, 9 aa, synthetic construct
  REGION 1..9: note = Description of Artificial Sequence: Synthetic peptide
DGTVLVPFR

SEQ ID NO: 151 - protein, 9 aa, synthetic construct
  REGION 1..9: note = Description of Artificial Sequence: Synthetic peptide
DGAGGTSGW

SEQ ID NO: 152 - protein, 9 aa, synthetic construct
  REGION 1..9: note = Description of Artificial Sequence: Synthetic peptide
AQYLKGYSV

SEQ ID NO: 153 - protein, 9 aa, synthetic construct
  REGION 1..9: note = Description of Artificial Sequence: Synthetic peptide
DGTHAYMAS

SEQ ID NO: 154 - protein, 9 aa, synthetic construct
  REGION 1..9: note = Description of Artificial Sequence: Synthetic peptide
DGTGGLRGW

SEQ ID NO: 155 - protein, 9 aa, synthetic construct
  REGION 1..9: note = Description of Artificial Sequence: Synthetic peptide
DGTADRPFR

SEQ ID NO: 156 - protein, 9 aa, synthetic construct
  REGION 1..9: note = Description of Artificial Sequence: Synthetic peptide
DGTLERPFR

SEQ ID NO: 157 - protein, 9 aa, synthetic construct
  REGION 1..9: note = Description of Artificial Sequence: Synthetic peptide
DGTKLMLSS

SEQ ID NO: 158 - protein, 9 aa, synthetic construct
  REGION 1..9: note = Description of Artificial Sequence: Synthetic peptide
DGTQGLKGW

SEQ ID NO: 159 - protein, 9 aa, synthetic construct
  REGION 1..9: note = Description of Artificial Sequence: Synthetic peptide
DGTGRLTGW

SEQ ID NO: 160 - protein, 9 aa, synthetic construct
  REGION 1..9: note = Description of Artificial Sequence: Synthetic peptide
DGSPEKPFR

SEQ ID NO: 161 - protein, 9 aa, synthetic construct
  REGION 1..9: note = Description of Artificial Sequence: Synthetic peptide
AQTGFAPPR

SEQ ID NO: 162 - protein, 9 aa, synthetic construct
  REGION 1..9: note = Description of Artificial Sequence: Synthetic peptide
DGTHIHLSS

SEQ ID NO: 163 - protein, 9 aa, synthetic construct
  REGION 1..9: note = Description of Artificial Sequence: Synthetic peptide
AQTSAKPFL

SEQ ID NO: 164 - protein, 9 aa, synthetic construct
  REGION 1..9: note = Description of Artificial Sequence: Synthetic peptide
DGTVRVPFR

SEQ ID NO: 165 - protein, 9 aa, synthetic construct
  REGION 1..9: note = Description of Artificial Sequence: Synthetic peptide
AQVHVGSVY

SEQ ID NO: 166 - protein, 9 aa, synthetic construct
  REGION 1..9: note = Description of Artificial Sequence: Synthetic peptide
DGTSLRLSS

SEQ ID NO: 167 - protein, 9 aa, synthetic construct
  REGION 1..9: note = Description of Artificial Sequence: Synthetic peptide
DGNGGLKGW

SEQ ID NO: 168 - protein, 9 aa, synthetic construct
  REGION 1..9: note = Description of Artificial Sequence: Synthetic peptide
AQTLAVPFK

SEQ ID NO: 169 - protein, 9 aa, synthetic construct
  REGION 1..9: note = Description of Artificial Sequence: Synthetic peptide
AQSLATPFR

SEQ ID NO: 170 - DNA, 135 bp, synthetic construct
  misc_difference 1..10: note = a, c, t, g, unknown or other
  misc_difference 15..16: note = a, c, t, g, unknown or other
  misc_difference 24..25: note = a, c, t, g, unknown or other
  misc_difference 27: note = a, c, t, g, unknown or other
  misc_feature 1..135: note = Description of Artificial Sequence: Synthetic polynucleotide
  source 1..135: mol_type = other DNA
nnnnnnnnnntactnnccggtagnncngagtcctatggacaagtggccacaaaccaccagagtgcccaatgggggggggggggggggggggcacaggcgcagaccggctgggttcaaaaccaaggaatacttccg

SEQ ID NO: 171 - DNA, 138 bp, synthetic construct
  misc_difference 1..12: note = a, c, t, g, unknown or other
  misc_difference 26: note = a, c, t, g, unknown or other
  misc_difference 28: note = a, c, t, g, unknown or other
  misc_difference 77: note = a, c, t, g, unknown or other
  misc_difference 82..83: note = a, c, t, g, unknown or other
  misc_difference 85..86: note = a, c, t, g, unknown or other
  misc_difference 91: note = a, c, t, g, unknown or other
  misc_feature 1..138: note = Description of Artificial Sequence: Synthetic polynucleotide
  source 1..138: mol_type = other DNA
nnnnnnnnnnnntactaacccggtancncggagtcctatggacaagtggccacaaaccaccagagtgcccaaagccncttcnncnncaacnacgcacaggcgcagaccggctgggttcaaaaccaaggaatacttccg

SEQ ID NO: 172 - DNA, 20 bp, synthetic construct
  misc_feature 1..20: note = Description of Artificial Sequence: Synthetic oligonucleotide
  source 1..20: mol_type = other DNA
tggccacaaaccaccagagt

SEQ ID NO: 173 - DNA, 18 bp, synthetic construct
  misc_feature 1..18: note = Description of Artificial Sequence: Synthetic oligonucleotide
  source 1..18: mol_type = other DNA
cagccggtctgcgcctgt

SEQ ID NO: 174 - DNA, 37 bp, synthetic construct
  misc_feature 1..37: note = Description of Artificial Sequence: Synthetic oligonucleotide
  source 1..37: mol_type = other DNA
ctatggacaagtggccacaaaccaccagagtgcccaa

SEQ ID NO: 175 - DNA, 12 bp, synthetic construct
  misc_feature 1..12: note = Description of Artificial Sequence: Synthetic oligonucleotide
  source 1..12: mol_type = other DNA
gcacaggcgcag

SEQ ID NO: 176 - DNA, 56 bp, unidentified
  misc_feature 1..56: note = Description of Unknown: protelomerase recognition sequence
  source 1..56: mol_type = unassigned DNA
tatcagcacacaattgcccattatacgcgcgtataatggactattgtgtgctgata

SEQ ID NO: 177 - DNA, 56 bp, unidentified
  misc_feature 1..56: note = Description of Unknown: protelomerase sequence
  source 1..56: mol_type = unassigned DNA
tatcagcacacaattgcccattatacgcgcgtataatgggcaattgtgtgctgata

SEQ ID NO: 178 - DNA, 56 bp, unidentified
  misc_feature 1..56: note = Description of Unknown: protelomerase sequence
  source 1..56: mol_type = unassigned DNA
tatcagcacacaatagtccattatacgcgcgtataatggactattgtgtgctgata

SEQ ID NO: 179 - protein, 20 aa, synthetic construct
  REGION 1..20: note = Description of Artificial Sequence: Synthetic peptide
TNHQSDGTLSQPFRAQAQTG

SEQ ID NO: 180 - protein, 20 aa, synthetic construct
  REGION 1..20: note = Description of Artificial Sequence: Synthetic peptide
TNHQSDGTTYVPPRAQAQTG

SEQ ID NO: 181 - protein, 20 aa, synthetic construct
  REGION 1..20: note = Description of Artificial Sequence: Synthetic peptide
TNHQSDGTADKPFRAQAQTG

SEQ ID NO: 182 - protein, 20 aa, synthetic construct
  REGION 1..20: note = Description of Artificial Sequence: Synthetic peptide
TNHQSDGTNGLKGWAQAQTG

SEQ ID NO: 183 - protein, 20 aa, synthetic construct
  REGION 1..20: note = Description of Artificial Sequence: Synthetic peptide
TNHQSAQPEGSARWAQAQTG

SEQ ID NO: 184 - protein, 20 aa, synthetic construct
  REGION 1..20: note = Description of Artificial Sequence: Synthetic peptide
TNHQSAQWPTSYDAAQAQTG

SEQ ID NO: 185 - protein, 20 aa, synthetic construct
  REGION 1..20: note = Description of Artificial Sequence: Synthetic peptide
TNHQSDGTSSYYDSAQAQTG

SEQ ID NO: 186 - protein, 20 aa, synthetic construct
  REGION 1..20: note = Description of Artificial Sequence: Synthetic peptide
TNHQSDGTLAVPFKAQAQTG

SEQ ID NO: 187 - protein, 20 aa, synthetic construct
  REGION 1..20: note = Description of Artificial Sequence: Synthetic peptide
TNHQSAQTLAVPFKAQAQTG

SEQ ID NO: 188 - protein, 13 aa, synthetic construct
  REGION 1..13: note = Description of Artificial Sequence: Synthetic peptide
TNHQSAQAQAQTG

SEQ ID NO: 189 - DNA, 133 bp, synthetic construct
  misc_feature 1..133: note = Description of Artificial Sequence: Synthetic polynucleotide
  source 1..133: mol_type = other DNA
gatcaactacgcggacaggtaccaaaacaaatgttctcgtcacgtgggcatgaatctgatgctgtttccctgcagacaatgcgagagactgaatcagaattcaaatatctgcttcactcacggtgtcaaagac

SEQ ID NO: 190 - DNA, 107 bp, synthetic construct
  misc_difference 28: note = a, c, t, g, unknown or other
  misc_difference 31: note = a, c, t, g, unknown or other
  misc_difference 34: note = a, c, t, g, unknown or other
  misc_difference 37: note = a, c, t, g, unknown or other
  misc_difference 40: note = a, c, t, g, unknown or other
  misc_difference 63: note = a, c, t, g, unknown or other
  misc_difference 66: note = a, c, t, g, unknown or other
  misc_difference 69: note = a, c, t, g, unknown or other
  misc_difference 72: note = a, c, t, g, unknown or other
  misc_difference 75: note = a, c, t, g, unknown or other
  misc_feature 1..107: note = Description of Artificial Sequence: Synthetic polynucleotide
  source 1..107: mol_type = other DNA
gatcaactacgcggacaggtaccaaaanswnswnswnswnswaggtcattccatcgagatctnswnswnswnswnswgtttaaaccttcactcacggtgtcaaagac

SEQ ID NO: 191 - DNA, 115 bp, synthetic construct
  misc_difference 36: note = a, c, t, g, unknown or other
  misc_difference 39: note = a, c, t, g, unknown or other
  misc_difference 42: note = a, c, t, g, unknown or other
  misc_difference 45: note = a, c, t, g, unknown or other
  misc_difference 48: note = a, c, t, g, unknown or other
  misc_difference 71: note = a, c, t, g, unknown or other
  misc_difference 74: note = a, c, t, g, unknown or other
  misc_difference 77: note = a, c, t, g, unknown or other
  misc_difference 80: note = a, c, t, g, unknown or other
  misc_difference 83: note = a, c, t, g, unknown or other
  misc_feature 1..115: note = Description of Artificial Sequence: Synthetic polynucleotide
  source 1..115: mol_type = other DNA
gatcaactacgcggacaggtaccaaaacaaatgttnswnswnswnswnswaggtcattccatcgagatctnswnswnswnswnswgtttaaaccttcactcacggtgtcaaagac

SEQ ID NO: 192 - DNA, 124 bp, synthetic construct
  misc_difference 45: note = a, c, t, g, unknown or other
  misc_difference 48: note = a, c, t, g, unknown or other
  misc_difference 51: note = a, c, t, g, unknown or other
  misc_difference 54: note = a, c, t, g, unknown or other
  misc_difference 57: note = a, c, t, g, unknown or other
  misc_difference 80: note = a, c, t, g, unknown or other
  misc_difference 83: note = a, c, t, g, unknown or other
  misc_difference 86: note = a, c, t, g, unknown or other
  misc_difference 89: note = a, c, t, g, unknown or other
  misc_difference 92: note = a, c, t, g, unknown or other
  misc_feature 1..124: note = Description of Artificial Sequence: Synthetic polynucleotide
  source 1..124: mol_type = other DNA
gatcaactacgcggacaggtaccaaaacaaatgttctcgtcacgnswnswnswnswnswaggtcattccatcgagatctnswnswnswnswnswgtttaaaccttcactcacggtgtcaaagac

SEQ ID NO: 193 - DNA, 133 bp, synthetic construct
  misc_difference 54: note = a, c, t, g, unknown or other
  misc_difference 57: note = a, c, t, g, unknown or other
  misc_difference 60: note = a, c, t, g, unknown or other
  misc_difference 63: note = a, c, t, g, unknown or other
  misc_difference 66: note = a, c, t, g, unknown or other
  misc_difference 89: note = a, c, t, g, unknown or other
  misc_difference 92: note = a, c, t, g, unknown or other
  misc_difference 95: note = a, c, t, g, unknown or other
  misc_difference 98: note = a, c, t, g, unknown or other
  misc_difference 101: note = a, c, t, g, unknown or other
  misc_feature 1..133: note = Description of Artificial Sequence: Synthetic polynucleotide
  source 1..133: mol_type = other DNA
gatcaactacgcggacaggtaccaaaacaaatgttctcgtcacgtgggcatganswnswnswnswnswaggtcattccatcgagatctnswnswnswnswnswgtttaaaccttcactcacggtgtcaaagac

SEQ ID NO: 194 - protein, 9 aa, synthetic construct
  REGION 1..9: note = Description of Artificial Sequence: Synthetic peptide
AQAGAGSER

SEQ ID NO: 195 - protein, 9 aa, synthetic construct
  REGION 1..9: note = Description of Artificial Sequence: Synthetic peptide
AQDQNPGRW

SEQ ID NO: 196 - protein, 9 aa, synthetic construct
  REGION 1..9: note = Description of Artificial Sequence: Synthetic peptide
AQEVPGYRW

SEQ ID NO: 197 - protein, 9 aa, synthetic construct
  REGION 1..9: note = Description of Artificial Sequence: Synthetic peptide
AQGGSTGSN

SEQ ID NO: 198 - protein, 9 aa, synthetic construct
  REGION 1..9: note = Description of Artificial Sequence: Synthetic peptide
AQGRDGWAA

SEQ ID NO: 199 - protein, 9 aa, synthetic construct
  REGION 1..9: note = Description of Artificial Sequence: Synthetic peptide
AQGRMTDSQ

SEQ ID NO: 200 - protein, 9 aa, synthetic construct
  REGION 1..9: note = Description of Artificial Sequence: Synthetic peptide
AQGSNSPQV

SEQ ID NO: 201 - protein, 9 aa, synthetic construct
  REGION 1..9: note = Description of Artificial Sequence: Synthetic peptide
AQGVFIPPK

SEQ ID NO: 202 - protein, 9 aa, synthetic construct
  REGION 1..9: note = Description of Artificial Sequence: Synthetic peptide
AQHVNASQS

SEQ ID NO: 203 - protein, 9 aa, synthetic construct
  REGION 1..9: note = Description of Artificial Sequence: Synthetic peptide
AQIKAGWAQ

SEQ ID NO: 204 - protein, 9 aa, synthetic construct
  REGION 1..9: note = Description of Artificial Sequence: Synthetic peptide
AQIMSGYAQ

SEQ ID NO: 205 - protein, 9 aa, synthetic construct
  REGION 1..9: note = Description of Artificial Sequence: Synthetic peptide
AQKSVGSVY

SEQ ID NO: 206 - protein, 9 aa, synthetic construct
  REGION 1..9: note = Description of Artificial Sequence: Synthetic peptide
AQLEHGFAQ

SEQ ID NO: 207 - protein, 9 aa, synthetic construct
  REGION 1..9: note = Description of Artificial Sequence: Synthetic peptide
AQLGGVLSA

SEQ ID NO: 208 - protein, 9 aa, synthetic construct
  REGION 1..9: note = Description of Artificial Sequence: Synthetic peptide
AQLGLSQGR

SEQ ID NO: 209 - protein, 9 aa, synthetic construct
  REGION 1..9: note = Description of Artificial Sequence: Synthetic peptide
AQLGYGFAQ

SEQ ID NO: 210 - protein, 9 aa, synthetic construct
  REGION 1..9: note = Description of Artificial Sequence: Synthetic peptide
AQLRIGFAQ

SEQ ID NO: 211 - protein, 9 aa, synthetic construct
  REGION 1..9: note = Description of Artificial Sequence: Synthetic peptide
AQLRMGYSQ

SEQ ID NO: 212 - protein, 9 aa, synthetic construct
  REGION 1..9: note = Description of Artificial Sequence: Synthetic peptide
AQLRQGYAQ

SEQ ID NO: 213 - protein, 9 aa, synthetic construct
  REGION 1..9: note = Description of Artificial Sequence: Synthetic peptide
AQLSCRSQM

SEQ ID NO: 214 - protein, 9 aa, synthetic construct
  REGION 1..9: note = Description of Artificial Sequence: Synthetic peptide
AQLTYSQSL

SEQ ID NO: 215 - protein, 9 aa, synthetic construct
  REGION 1..9: note = Description of Artificial Sequence: Synthetic peptide
AQLYKGYSQ

SEQ ID NO: 216 - protein, 9 aa, synthetic construct
  REGION 1..9: note = Description of Artificial Sequence: Synthetic peptide
AQMPQRPFL

SEQ ID NO: 217 - protein, 9 aa, synthetic construct
  REGION 1..9: note = Description of Artificial Sequence: Synthetic peptide
AQPLAVYGA

SEQ ID NO: 218 - protein, 9 aa, synthetic construct
  REGION 1..9: note = Description of Artificial Sequence: Synthetic peptide
AQPQSSSMS

SEQ ID NO: 219 - protein, 9 aa, synthetic construct
  REGION 1..9: note = Description of Artificial Sequence: Synthetic peptide
AQPSVGGYW

SEQ ID NO: 220 - protein, 9 aa, synthetic construct
  REGION 1..9: note = Description of Artificial Sequence: Synthetic peptide
AQQAVGQSW

SEQ ID NO: 221 - protein, 9 aa, synthetic construct
  REGION 1..9: note = Description of Artificial Sequence: Synthetic peptide
AQQRSLASG

SEQ ID NO: 222 - protein, 9 aa, synthetic construct
  REGION 1..9: note = Description of Artificial Sequence: Synthetic peptide
AQQVMNSQG

SEQ ID NO: 223 - protein, 9 aa, synthetic construct
  REGION 1..9: note = Description of Artificial Sequence: Synthetic peptide
AQRGVGLSQ

SEQ ID NO: 224 - protein, 9 aa, synthetic construct
  REGION 1..9: note = Description of Artificial Sequence: Synthetic peptide
AQRHDAEGS

SEQ ID NO: 225 - protein, 9 aa, synthetic construct
  REGION 1..9: note = Description of Artificial Sequence: Synthetic peptide
AQRKGEPHY

SEQ ID NO: 226 - protein, 9 aa, synthetic construct
  REGION 1..9: note = Description of Artificial Sequence: Synthetic peptide
AQSAMAAKG

SEQ ID NO: 227 - protein, 9 aa, synthetic construct
  REGION 1..9: note = Description of Artificial Sequence: Synthetic peptide
AQSGGLTGS

SEQ ID NO: 228 - protein, 9 aa, synthetic construct
  REGION 1..9: note = Description of Artificial Sequence: Synthetic peptide
AQSGGVGQV

SEQ ID NO: 229 - protein, 9 aa, synthetic construct
  REGION 1..9: note = Description of Artificial Sequence: Synthetic peptide
AQSMSRPFL

SEQ ID NO: 230 - protein, 9 aa, synthetic construct
  REGION 1..9: note = Description of Artificial Sequence: Synthetic peptide
AQSQLRPFL

SEQ ID NO: 231 - protein, 9 aa, synthetic construct
  REGION 1..9: note = Description of Artificial Sequence: Synthetic peptide
AQSVAKPFL

SEQ ID NO: 232 - protein, 9 aa, synthetic construct
  REGION 1..9: note = Description of Artificial Sequence: Synthetic peptide
AQSVSQPFR

SEQ ID NO: 233 - protein, 9 aa, synthetic construct
  REGION 1..9: note = Description of Artificial Sequence: Synthetic peptide
AQSVVRPFL

SEQ ID NO: 234 - protein, 9 aa, synthetic construct
  REGION 1..9: note = Description of Artificial Sequence: Synthetic peptide
AQTALSSST

SEQ ID NO: 235 - protein, 9 aa, synthetic construct
  REGION 1..9: note = Description of Artificial Sequence: Synthetic peptide
AQTEMGGRC

SEQ ID NO: 236 - protein, 9 aa, synthetic construct
  REGION 1..9: note = Description of Artificial Sequence: Synthetic peptide
AQTIRGYSS

SEQ ID NO: 237 - protein, 9 aa, synthetic construct
  REGION 1..9: note = Description of Artificial Sequence: Synthetic peptide
AQTISNYHT

SEQ ID NO: 238 - protein, 9 aa, synthetic construct
  REGION 1..9: note = Description of Artificial Sequence: Synthetic peptide
AQTPDRPWL

SEQ ID NO: 239 - protein, 9 aa, synthetic construct
  REGION 1..9: note = Description of Artificial Sequence: Synthetic peptide
AQTVARPFY

SEQ ID NO: 240 - protein, 9 aa, synthetic construct
  REGION 1..9: note = Description of Artificial Sequence: Synthetic peptide
AQTVATPFR

SEQ ID NO: 241 - protein, 9 aa, synthetic construct
  REGION 1..9: note = Description of Artificial Sequence: Synthetic peptide
AQTVTQLFK

SEQ ID NO: 242 - protein, 9 aa, synthetic construct
  REGION 1..9: note = Description of Artificial Sequence: Synthetic peptide
AQVLAGYNM

SEQ ID NO: 243 - protein, 9 aa, synthetic construct
  REGION 1..9: note = Description of Artificial Sequence: Synthetic peptide
AQVSEARVR

SEQ ID NO: 244 - protein, 9 aa, synthetic construct
  REGION 1..9: note = Description of Artificial Sequence: Synthetic peptide
AQVVVGYSQ

SEQ ID NO: 245 - protein, 9 aa, synthetic construct
  REGION 1..9: note = Description of Artificial Sequence: Synthetic peptide
AQWAAGYNV

SEQ ID NO: 246 - protein, 9 aa, synthetic construct
  REGION 1..9: note = Description of Artificial Sequence: Synthetic peptide
AQWELSNGY

SEQ ID NO: 247 - protein, 9 aa, synthetic construct
  REGION 1..9: note = Description of Artificial Sequence: Synthetic peptide
AQWEVKGGY

SEQ ID NO: 248 - protein, 9 aa, synthetic construct
  REGION 1..9: note = Description of Artificial Sequence: Synthetic peptide
AQWEVKRGY

SEQ ID NO: 249 - protein, 9 aa, synthetic construct
  REGION 1..9: note = Description of Artificial Sequence: Synthetic peptide
AQWEVQSGF

SEQ ID NO: 250 - protein, 9 aa, synthetic construct
  REGION 1..9: note = Description of Artificial Sequence: Synthetic peptide
AQWEVRGGY

SEQ ID NO: 251 - protein, 9 aa, synthetic construct
  REGION 1..9: note = Description of Artificial Sequence: Synthetic peptide
AQWEVTSGW

SEQ ID NO: 252 - protein, 9 aa, synthetic construct
  REGION 1..9: note = Description of Artificial Sequence: Synthetic peptide
AQWGAPSHG

SEQ ID NO: 253 - protein, 9 aa, synthetic construct
  REGION 1..9: note = Description of Artificial Sequence: Synthetic peptide
AQWMELGSS

SEQ ID NO: 254 - protein, 9 aa, synthetic construct
  REGION 1..9: note = Description of Artificial Sequence: Synthetic peptide
AQWMFGGSG

SEQ ID NO: 255 - protein, 9 aa, synthetic construct
  REGION 1..9: note = Description of Artificial Sequence: Synthetic peptide
AQWMLGGAQ

SEQ ID NO: 256 - protein, 9 aa, synthetic construct
  REGION 1..9: note = Description of Artificial Sequence: Synthetic peptide
AQWPTAYDA

SEQ ID NO: 257 - protein, 9 aa, synthetic construct
  REGION 1..9: note = Description of Artificial Sequence: Synthetic peptide
AQWQVQTGF

SEQ ID NO: 258 - protein, 9 aa, synthetic construct
  REGION 1..9: note = Description of Artificial Sequence: Synthetic peptide
AQWSTEGGY

SEQ ID NO: 259 - protein, 9 aa, synthetic construct
  REGION 1..9: note = Description of Artificial Sequence: Synthetic peptide
AQWTAAGGY

SEQ ID NO: 260 - protein, 9 aa, synthetic construct
  REGION 1..9: note = Description of Artificial Sequence: Synthetic peptide
AQWTTESGY

SEQ ID NO: 261 - protein, 9 aa, synthetic construct
  REGION 1..9: note = Description of Artificial Sequence: Synthetic peptide
AQWVYGSSH

SEQ ID NO: 262 - protein, 9 aa, synthetic construct
  REGION 1..9: note = Description of Artificial Sequence: Synthetic peptide
AQYLAGYTV

SEQ ID NO: 263 - protein, 9 aa, synthetic construct
  REGION 1..9: note = Description of Artificial Sequence: Synthetic peptide
AQYLSGYNT

SEQ ID NO: 264 - protein, 9 aa, synthetic construct
  REGION 1..9: note = Description of Artificial Sequence: Synthetic peptide
DGAAATTGW

SEQ ID NO: 265 - protein, 9 aa, synthetic construct
  REGION 1..9: note = Description of Artificial Sequence: Synthetic peptide
DGAGTTSGW

SEQ ID NO: 266 - protein, 9 aa, synthetic construct
  REGION 1..9: note = Description of Artificial Sequence: Synthetic peptide
DGAHGLSGW

SEQ ID NO: 267 - protein, 9 aa, synthetic construct
  REGION 1..9: note = Description of Artificial Sequence: Synthetic peptide
DGAHVGLSS

SEQ ID NO: 268 - protein, 9 aa, synthetic construct
  REGION 1..9: note = Description of Artificial Sequence: Synthetic peptide
DGARTVLQL

SEQ ID NO: 269 - protein, 9 aa, synthetic construct
  REGION 1..9: note = Description of Artificial Sequence: Synthetic peptide
DGEYQKPFR

SEQ ID NO: 270 - protein, 9 aa, synthetic construct
  REGION 1..9: note = Description of Artificial Sequence: Synthetic peptide
DGGGTTTGW

SEQ ID NO: 271 - protein, 9 aa, synthetic construct
  REGION 1..9: note = Description of Artificial Sequence: Synthetic peptide
DGHATSMGW

SEQ ID NO: 272 - protein, 9 aa, synthetic construct
  REGION 1..9: note = Description of Artificial Sequence: Synthetic peptide
DGKGSTQGW

SEQ ID NO: 273 - protein, 9 aa, synthetic construct
  REGION 1..9: note = Description of Artificial Sequence: Synthetic peptide
DGQGGLSGW

SEQ ID NO: 274 - protein, 9 aa, synthetic construct
  REGION 1..9: note = Description of Artificial Sequence: Synthetic peptide
DGRATKTLY

SEQ ID NO: 275 - protein, 9 aa, synthetic construct
  REGION 1..9: note = Description of Artificial Sequence: Synthetic peptide
DGRNALTGW

SEQ ID NO: 276 - protein, 9 aa, synthetic construct
  REGION 1..9: note = Description of Artificial Sequence: Synthetic peptide
DGRRQVIQL

SEQ ID NO: 277 - protein, 9 aa, synthetic construct
  REGION 1..9: note = Description of Artificial Sequence: Synthetic peptide
DGRVYGLSS

SEQ ID NO: 278 - protein, 9 aa, synthetic construct
  REGION 1..9: note = Description of Artificial Sequence: Synthetic peptide
DGSGTVSGW

SEQ ID NO: 279 - protein, 9 aa, synthetic construct
  REGION 1..9: note = Description of Artificial Sequence: Synthetic peptide
DGTAIYLSS

SEQ ID NO: 280 - protein, 9 aa, synthetic construct
  REGION 1..9: note = Description of Artificial Sequence: Synthetic peptide
DGTALMLSS

SEQ ID NO: 281 - protein, 9 aa, synthetic construct
  REGION 1..9: note = Description of Artificial Sequence: Synthetic peptide
DGTASISGW

SEQ ID NO: 282 - protein, 9 aa, synthetic construct
  REGION 1..9: note = Description of Artificial Sequence: Synthetic peptide
DGTASTSGW

SEQ ID NO: 283 - protein, 9 aa, synthetic construct
  REGION 1..9: note = Description of Artificial Sequence: Synthetic peptide
DGTASVTGW

SEQ ID NO: 284 - protein, 9 aa, synthetic construct
  REGION 1..9: note = Description of Artificial Sequence: Synthetic peptide
DGTATTMGW

SEQ ID NO: 285 - protein, 9 aa, synthetic construct
  REGION 1..9: note = Description of Artificial Sequence: Synthetic peptide
DGTATTTGW

SEQ ID NO: 286 - protein, 9 aa, synthetic construct
  REGION 1..9: note = Description of Artificial Sequence: Synthetic peptide
DGTAYRLSS

SEQ ID NO: 287 - protein, 9 aa, synthetic construct
  REGION 1..9: note = Description of Artificial Sequence: Synthetic peptide
DGTDKMWSI

SEQ ID NO: 288 - protein, 9 aa, synthetic construct
  REGION 1..9: note = Description of Artificial Sequence: Synthetic peptide
DGTGGIMGW

SEQ ID NO: 289 - protein, 9 aa, synthetic construct
  REGION 1..9: note = Description of Artificial Sequence: Synthetic peptide
DGTGGISGW

SEQ ID NO: 290 - protein, 9 aa, synthetic construct
  REGION 1..9: note = Description of Artificial Sequence: Synthetic peptide
DGTGGLAGW

SEQ ID NO: 291 - protein, 9 aa, synthetic construct
  REGION 1..9: note = Description of Artificial Sequence: Synthetic peptide
DGTGGLHGW

SEQ ID NO: 292 - protein, 9 aa, synthetic construct
  REGION 1..9: note = Description of Artificial Sequence: Synthetic peptide
DGTGGLQGW

SEQ ID NO: 293 - protein, 9 aa, synthetic construct
  REGION 1..9: note = Description of Artificial Sequence: Synthetic peptide
DGTGGLSGW

SEQ ID NO: 294 - protein, 9 aa, synthetic construct
  REGION 1..9: note = Description of Artificial Sequence: Synthetic peptide
DGTGGLTGW

SEQ ID NO: 295 - protein, 9 aa, synthetic construct
  REGION 1..9: note = Description of Artificial Sequence: Synthetic peptide
DGTGGTSGW

SEQ ID NO: 296 - protein, 9 aa, synthetic construct
  REGION 1..9: note = Description of Artificial Sequence: Synthetic peptide
DGTGGVHGW

SEQ ID NO: 297 - protein, 9 aa, synthetic construct
  REGION 1..9: note = Description of Artificial Sequence: Synthetic peptide
DGTGGVMGW

SEQ ID NO: 298 - protein, 9 aa, synthetic construct
  REGION 1..9: note = Description of Artificial Sequence: Synthetic peptide
DGTGGVSGW

SEQ ID NO: 299 - protein, 9 aa, synthetic construct
  REGION 1..9: note = Description of Artificial Sequence: Synthetic peptide
DGTGGVTGW

SEQ ID NO: 300 - protein, 9 aa, synthetic construct
  REGION 1..9: note = Description of Artificial Sequence: Synthetic peptide
DGTGGVYGW

SEQ ID NO: 301 - protein, 9 aa, synthetic construct
  REGION 1..9: note = Description of Artificial Sequence: Synthetic peptide
DGTGNLQGW

SEQ ID NO: 302 - protein, 9 aa, synthetic construct
  REGION 1..9: note = Description of Artificial Sequence: Synthetic peptide
DGTGNLSGW

SEQ ID NO: 303 - protein, 9 aa, synthetic construct
  REGION 1..9: note = Description of Artificial Sequence: Synthetic peptide
DGTGNVSGW

SEQ ID NO: 304 - protein, 9 aa, synthetic construct
  REGION 1..9: note = Description of Artificial Sequence: Synthetic peptide
DGTGQLVGW

SEQ ID NO: 305 - protein, 9 aa, synthetic construct
  REGION 1..9: note = Description of Artificial Sequence: Synthetic peptide
DGTGQTIGW

SEQ ID NO: 306 - protein, 9 aa, synthetic construct
  REGION 1..9: note = Description of Artificial Sequence: Synthetic peptide
DGTGSGMMT

SEQ ID NO: 307 - protein, 9 aa, synthetic construct
  REGION 1..9: note = Description of Artificial Sequence: Synthetic peptide
DGTGSISGW

SEQ ID NO: 308 - protein, 9 aa, synthetic construct
  REGION 1..9: note = Description of Artificial Sequence: Synthetic peptide
DGTGSLAGW

SEQ ID NO: 309 - protein, 9 aa, synthetic construct
  REGION 1..9: note = Description of Artificial Sequence: Synthetic peptide
DGTGSLNGW

SEQ ID NO: 310 - protein, 9 aa, synthetic construct
  REGION 1..9: note = Description of Artificial Sequence: Synthetic peptide
DGTGSLQGW

SEQ ID NO: 311 - protein, 9 aa, synthetic construct
  REGION 1..9: note = Description of Artificial Sequence: Synthetic peptide
DGTGSLSGW

SEQ ID NO: 312 - protein, 9 aa, synthetic construct
  REGION 1..9: note = Description of Artificial Sequence: Synthetic peptide
DGTGSLVGW

SEQ ID NO: 313 - protein, 9 aa, synthetic construct
  REGION 1..9: note = Description of Artificial Sequence: Synthetic peptide
DGTGSTKGW

SEQ ID NO: 314 - protein, 9 aa, synthetic construct
  REGION 1..9: note = Description of Artificial Sequence: Synthetic peptide
DGTGSTMGW

SEQ ID NO: 315 - protein, 9 aa, synthetic construct
  REGION 1..9: note = Description of Artificial Sequence: Synthetic peptide
DGTGSTQGW

SEQ ID NO: 316 - protein, 9 aa, synthetic construct
  REGION 1..9: note = Description of Artificial Sequence: Synthetic peptide
DGTGSTSGW

SEQ ID NO: 317 - protein, 9 aa, synthetic construct
  REGION 1..9: note = Description of Artificial Sequence: Synthetic peptide
DGTGSVMGW

SEQ ID NO: 318 - protein, 9 aa, synthetic construct
  REGION 1..9: note = Description of Artificial Sequence: Synthetic peptide
DGTGSVTGW

SEQ ID NO: 319 - protein, 9 aa, synthetic construct
  REGION 1..9: note = Description of Artificial Sequence: Synthetic peptide
DGTGTLAGW

SEQ ID NO: 320 - protein, 9 aa, synthetic construct
  REGION 1..9: note = Description of Artificial Sequence: Synthetic peptide
DGTGTLHGW

SEQ ID NO: 321 - protein, 9 aa, synthetic construct
  REGION 1..9: note = Description of Artificial Sequence: Synthetic peptide
DGTGTLKGW

SEQ ID NO: 322 - protein, 9 aa, synthetic construct
  REGION 1..9: note = Description of Artificial Sequence: Synthetic peptide
DGTGTLSGW

SEQ ID NO: 323 - protein, 9 aa, synthetic construct
  REGION 1..9: note = Description of Artificial Sequence: Synthetic peptide
DGTGTTLGW

SEQ ID NO: 324 - protein, 9 aa, synthetic construct
  REGION 1..9: note = Description of Artificial Sequence: Synthetic peptide
DGTGTTMGW

SEQ ID NO: 325 - protein, 9 aa, synthetic construct
  REGION 1..9: note = Description of Artificial Sequence: Synthetic peptide
DGTGTTYGW

SEQ ID NO: 326 - protein, 9 aa, synthetic construct
  REGION 1..9: note = Description of Artificial Sequence: Synthetic peptide
DGTGTVHGW

SEQ ID NO: 327 - protein, 9 aa, synthetic construct
  REGION 1..9: note = Description of Artificial Sequence: Synthetic peptide
DGTGTVQGW

SEQ ID NO: 328 - protein, 9 aa, synthetic construct
  REGION 1..9: note = Description of Artificial Sequence: Synthetic peptide
DGTGTVSGW

SEQ ID NO: 329 - protein, 9 aa, synthetic construct
  REGION 1..9: note = Description of Artificial Sequence: Synthetic peptide
DGTGTVTGW

SEQ ID NO: 330 - protein, 9 aa, synthetic construct
  REGION 1..9: note = Description of Artificial Sequence: Synthetic peptide
DGTHARLSS

SEQ ID NO: 331 - protein, 9 aa, synthetic construct
  REGION 1..9: note = Description of Artificial Sequence: Synthetic peptide
DGTHIRALS

SEQ ID NO: 332 - protein, 9 aa, synthetic construct
  REGION 1..9: note = Description of Artificial Sequence: Synthetic peptide
DGTHIRLAS

SEQ ID NO: 333 - protein, 9 aa, synthetic construct
  REGION 1..9: note = Description of Artificial Sequence: Synthetic peptide
DGTHLQPFR

SEQ ID NO: 334 - protein, 9 aa, synthetic construct
  REGION 1..9: note = Description of Artificial Sequence: Synthetic peptide
DGTHSFYDA

SEQ ID NO: 335 - protein, 9 aa, synthetic construct
  REGION 1..9: note = Description of Artificial Sequence: Synthetic peptide
DGTHVRALS

SEQ ID NO: 336 - protein, 9 aa, synthetic construct
  REGION 1..9: note = Description of Artificial Sequence: Synthetic peptide
DGTHVYMAS

SEQ ID NO: 337 - protein, 9 aa, synthetic construct
  REGION 1..9: note = Description of Artificial Sequence: Synthetic peptide
DGTHVYMSS

SEQ ID NO: 338 - protein, 9 aa, synthetic construct
  REGION 1..9: note = Description of Artificial Sequence: Synthetic peptide
DGTIALPFK

SEQ ID NO: 339 - protein, 9 aa, synthetic construct
  REGION 1..9: note = Description of Artificial Sequence: Synthetic peptide
DGTIALPFR

SEQ ID NO: 340 - protein, 9 aa, synthetic construct
  REGION 1..9: note = Description of Artificial Sequence: Synthetic peptide
DGTIATRYV

SEQ ID NO: 341 - protein, 9 aa, synthetic construct
  REGION 1..9: note = Description of Artificial Sequence: Synthetic peptide
DGTIGYAYV

SEQ ID NO: 342 - protein, 9 aa, synthetic construct
  REGION 1..9: note = Description of Artificial Sequence: Synthetic peptide
DGTIQAPFK

SEQ ID NO: 343 - protein, 9 aa, synthetic construct
  REGION 1..9: note = Description of Artificial Sequence: Synthetic peptide
DGTIRLPFK

SEQ ID NO: 344 - protein, 9 aa, synthetic construct
  REGION 1..9: note = Description of Artificial Sequence: Synthetic peptide
DGTISKEVG

SEQ ID NO: 345 - protein, 9 aa, synthetic construct
  REGION 1..9: note = Description of Artificial Sequence: Synthetic peptide
DGTKSLVQL

SEQ ID NO: 346 - protein, 9 aa, synthetic construct
  REGION 1..9: note = Description of Artificial Sequence: Synthetic peptide
DGTLAVNFK

SEQ ID NO: 347 - protein, 9 aa, synthetic construct
  REGION 1..9: note = Description of Artificial Sequence: Synthetic peptide
DGTLAYPFK

SEQ ID NO: 348 - protein, 9 aa, synthetic construct
  REGION 1..9: note = Description of Artificial Sequence: Synthetic peptide
DGTLEVHFK

SEQ ID NO: 349 - protein, 9 aa, synthetic construct
  REGION 1..9: note = Description of Artificial Sequence: Synthetic peptide
DGTLSRTLW

SEQ ID NO: 350 - protein, 9 aa, synthetic construct
  REGION 1..9: note = Description of Artificial Sequence: Synthetic peptide
DGTLSSPFR

SEQ ID NO: 351 - protein, 9 aa, synthetic construct
  REGION 1..9: note = Description of Artificial Sequence: Synthetic peptide
DGTLTVPFR

SEQ ID NO: 352 - protein, 9 aa, synthetic construct
  REGION 1..9: note = Description of Artificial Sequence: Synthetic peptide
DGTLVAPFR

SEQ ID NO: 353 - protein, 9 aa, synthetic construct
  REGION 1..9: note = Description of Artificial Sequence: Synthetic peptide
DGTMQLTGW

SEQ ID NO: 354 - protein, 9 aa, synthetic construct
  REGION 1..9: note = Description of Artificial Sequence: Synthetic peptide
DGTNSISGW

SEQ ID NO: 355 - protein, 9 aa, synthetic construct
  REGION 1..9: note = Description of Artificial Sequence: Synthetic peptide
DGTNSLSGW

SEQ ID NO: 356 - protein, 9 aa, synthetic construct
  REGION 1..9: note = Description of Artificial Sequence: Synthetic peptide
DGTNSVTGW

SEQ ID NO: 357 - protein, 9 aa, synthetic construct
  REGION 1..9: note = Description of Artificial Sequence: Synthetic peptide
DGTNTLGGW

SEQ ID NO: 358 - protein, 9 aa, synthetic construct
  REGION 1..9: note = Description of Artificial Sequence: Synthetic peptide
DGTNYRLSS

SEQ ID NO: 359 - protein, 9 aa, synthetic construct
  REGION 1..9: note = Description of Artificial Sequence: Synthetic peptide
DGTQALSGW

SEQ ID NO: 360 - protein, 9 aa, synthetic construct
  REGION 1..9: note = Description of Artificial Sequence: Synthetic peptide
DGTQTTSGW

SEQ ID NO: 361 - protein, 9 aa, synthetic construct
  REGION 1..9: note = Description of Artificial Sequence: Synthetic peptide
DGTRALTGW

SEQ ID NO: 362 - protein, 9 aa, synthetic construct
  REGION 1..9: note = Description of Artificial Sequence: Synthetic peptide
DGTRFSLSS

SEQ ID NO: 363 - protein, 9 aa, synthetic construct
  REGION 1..9: note = Description of Artificial Sequence: Synthetic peptide
DGTRGLSGW

SEQ ID NO: 364 - protein, 9 aa, synthetic construct
  REGION 1..9: note = Description of Artificial Sequence: Synthetic peptide
DGTRIGLSS

SEQ ID NO: 365 - protein, 9 aa, synthetic construct
  REGION 1..9: note = Description of Artificial Sequence: Synthetic peptide
DGTRLHLAS

SEQ ID NO: 366 - protein, 9 aa, synthetic construct
  REGION 1..9: note = Description of Artificial Sequence: Synthetic peptide
DGTRLHLSS

SEQ ID NO: 367 - protein, 9 aa, synthetic construct
  REGION 1..9: note = Description of Artificial Sequence: Synthetic peptide
DGTRLLLSS

SEQ ID NO: 368 - protein, 9 aa, synthetic construct
  REGION 1..9: note = Description of Artificial Sequence: Synthetic peptide
DGTRLMLSS

SEQ ID NO: 369 - protein, 9 aa, synthetic construct
  REGION 1..9: note = Description of Artificial Sequence: Synthetic peptide
DGTRLNLSS

SEQ ID NO: 370 - protein, 9 aa, synthetic construct
  REGION 1..9: note = Description of Artificial Sequence: Synthetic peptide
DGTRMVVQL

SEQ ID NO: 371 - protein, 9 aa, synthetic construct
  REGION 1..9: note = Description of Artificial Sequence: Synthetic peptide
DGTRSITGW

SEQ ID NO: 372 - protein, 9 aa, synthetic construct
  REGION 1..9: note = Description of Artificial Sequence: Synthetic peptide
DGTRSLHGW

SEQ ID NO: 373 - protein, 9 aa, synthetic construct
  REGION 1..9: note = Description of Artificial Sequence: Synthetic peptide
DGTRSTTGW

SEQ ID NO: 374 - protein, 9 aa, synthetic construct
  REGION 1..9: note = Description of Artificial Sequence: Synthetic peptide
DGTRTVTGW

SEQ ID NO: 375 - protein, 9 aa, synthetic construct
  REGION 1..9: note = Description of Artificial Sequence: Synthetic peptide
DGTRTVVQL

SEQ ID NO: 376 - protein, 9 aa, synthetic construct
  REGION 1..9: note = Description of Artificial Sequence: Synthetic peptide
DGTRVHLSS

SEQ ID NO: 377 - protein, 9 aa, synthetic construct
  REGION 1..9: note = Description of Artificial Sequence: Synthetic peptide
DGTSGLHGW

SEQ ID NO: 378 - protein, 9 aa, synthetic construct
  REGION 1..9: note = Description of Artificial Sequence: Synthetic peptide
DGTSIHLSS

SEQ ID NO: 379 - protein, 9 aa, synthetic construct
  REGION 1..9: note = Description of Artificial Sequence: Synthetic peptide
DGTSIMLSS

SEQ ID NO: 380 - protein, 9 aa, synthetic construct
  REGION 1..9: note = Description of Artificial Sequence: Synthetic peptide
DGTSNYGAR

SEQ ID NO: 381 - protein, 9 aa, synthetic construct
  REGION 1..9: note = Description of Artificial Sequence: Synthetic peptide
DGTSSYYDA

SEQ ID NO: 382 - protein, 9 aa, synthetic construct
  REGION 1..9: note = Description of Artificial Sequence: Synthetic peptide
DGTSTISGW

SEQ ID NO: 383 - protein, 9 aa, synthetic construct
  REGION 1..9: note = Description of Artificial Sequence: Synthetic peptide
DGTSTITGW

SEQ ID NO: 384 - protein, 9 aa, synthetic construct
  REGION 1..9: note = Description of Artificial Sequence: Synthetic peptide
DGTSTLHGW

SEQ ID NO: 385 - protein, 9 aa, synthetic construct
  REGION 1..9: note = Description of Artificial Sequence: Synthetic peptide
DGTSTLRGW

SEQ ID NO: 386 - protein, 9 aa, synthetic construct
  REGION 1..9: note = Description of Artificial Sequence: Synthetic peptide
DGTSTLSGW

SEQ ID NO: 387 - protein, 9 aa, synthetic construct
  REGION 1..9: note = Description of Artificial Sequence: Synthetic peptide
DGTTATYYK

SEQ ID NO: 388 - protein, 9 aa, synthetic construct
  REGION 1..9: note = Description of Artificial Sequence: Synthetic peptide
DGTTLAPFR

SEQ ID NO: 389 - protein, 9 aa, synthetic construct
  REGION 1..9: note = Description of Artificial Sequence: Synthetic peptide
DGTTSKTLW

SEQ ID NO: 390 - protein, 9 aa, synthetic construct
  REGION 1..9: note = Description of Artificial Sequence: Synthetic peptide
DGTTSRTLW

SEQ ID NO: 391 - protein, 9 aa, synthetic construct
  REGION 1..9: note = Description of Artificial Sequence: Synthetic peptide
DGTTTRSLY

SEQ ID NO: 392 - protein, 9 aa, synthetic construct
  REGION 1..9: note = Description of Artificial Sequence: Synthetic peptide
DGTTTTTGW

SEQ ID NO: 393 - protein, 9 aa, synthetic construct
  REGION 1..9: note = Description of Artificial Sequence: Synthetic peptide
DGTTYMLSS

SEQ ID NO: 394 - protein, 9 aa, synthetic construct
  REGION 1..9: note = Description of Artificial Sequence: Synthetic peptide
DGTVANPFR

SEQ ID NO: 395 - protein, 9 aa, synthetic construct
  REGION 1..9: note = Description of Artificial Sequence: Synthetic peptide
DGTVDRPFK

SEQ ID NO: 396 - protein, 9 aa, synthetic construct
  REGION 1..9: note = Description of Artificial Sequence: Synthetic peptide
DGTVILLSS

SEQ ID NO: 397 - protein, 9 aa, synthetic construct
  REGION 1..9: note = Description of Artificial Sequence: Synthetic peptide
DGTVIMLSS

SEQ ID NO: 398 - protein, 9 aa, synthetic construct
  REGION 1..9: note = Description of Artificial Sequence: Synthetic peptide
DGTVLHLSS

SEQ ID NO: 399 - protein, 9 aa, synthetic construct
  REGION 1..9: note = Description of Artificial Sequence: Synthetic peptide
DGTVLMLSS

SEQ ID NO: 400 - protein, 9 aa, synthetic construct
  REGION 1..9: note = Description of Artificial Sequence: Synthetic peptide
DGTVPYLAS

SEQ ID NO: 401 - protein, 9 aa, synthetic construct
  REGION 1..9: note = Description of Artificial Sequence: Synthetic peptide
DGTVPYLSS

SEQ ID NO: 402 - protein, 9 aa, synthetic construct
  REGION 1..9: note = Description of Artificial Sequence: Synthetic peptide
DGTVSMPFK

SEQ ID NO: 403 - protein, 9 aa, synthetic construct
  REGION 1..9: note = Description of Artificial Sequence: Synthetic peptide
DGTVSNPFR

SEQ ID NO: 404 - protein, 9 aa, synthetic construct
  REGION 1..9: note = Description of Artificial Sequence: Synthetic peptide
DGTVSTRWV

SEQ ID NO: 405 - protein, 9 aa, synthetic construct
  REGION 1..9: note = Description of Artificial Sequence: Synthetic peptide
DGTVTTTGW

SEQ ID NO: 406 - protein, 9 aa, synthetic construct
  REGION 1..9: note = Description of Artificial Sequence: Synthetic peptide
DGTVTVTGW

SEQ ID NO: 407 - protein, 9 aa, synthetic construct
  REGION 1..9: note = Description of Artificial Sequence: Synthetic peptide
DGTVWVPPR

SEQ ID NO: 408 - protein, 9 aa, synthetic construct
  REGION 1..9: note = Description of Artificial Sequence: Synthetic peptide
DGTVYRLSS

SEQ ID NO: 409 - protein, 9 aa, synthetic construct
  REGION 1..9: note = Description of Artificial Sequence: Synthetic peptide
DGTYARLSS

SEQ ID NO: 410 - protein, 9 aa, synthetic construct
  REGION 1..9: note = Description of Artificial Sequence: Synthetic peptide
DGTYGNKLW

SEQ ID NO: 411 - protein, 9 aa, synthetic construct
  REGION 1..9: note = Description of Artificial Sequence: Synthetic peptide
DGTYIHLSS

SEQ ID NO: 412 - protein, 9 aa, synthetic construct
  REGION 1..9: note = Description of Artificial Sequence: Synthetic peptide
DGTYSTSGW

SEQ ID NO: 413 - protein, 9 aa, synthetic construct
  REGION 1..9: note = Description of Artificial Sequence: Synthetic peptide
DGVVALLAS

SEQ ID NO: 414 - protein, 9 aa, synthetic construct
  REGION 1..9: note = Description of Artificial Sequence: Synthetic peptide
DGYVGVGSL

SEQ ID NO: 415 - DNA, 38 bp, synthetic construct
  misc_feature 1..38: note = Description of Artificial Sequence: Synthetic primer
  source 1..38: mol_type = other DNA
gaaacgaattaaacggtttattgattaacaatcgatta

SEQ ID NO: 416 - DNA, 45 bp, synthetic construct
  misc_feature 1..45: note = Description of Artificial Sequence: Synthetic primer
  source 1..45: mol_type = other DNA
cggtttattgattaacaatcgattacagattacgagtcaggtatc

SEQ ID NO: 417 - protein, 9 aa, synthetic construct
  REGION 1..9: note = Description of Artificial Sequence: Synthetic peptide
DGTLAVHFK

SEQ ID NO: 418 - protein, 9 aa, synthetic construct
  REGION 1..9: note = Description of Artificial Sequence: Synthetic peptide
DGTFAVPFK

SEQ ID NO: 419 - protein, 9 aa, synthetic construct
  REGION 1..9: note = Description of Artificial Sequence: Synthetic peptide
EGTLAVPFK

SEQ ID NO: 420 - protein, 9 aa, synthetic construct
  REGION 1..9: note = Description of Artificial Sequence: Synthetic peptide
DGTMAVPFK

SEQ ID NO: 421 - protein, 9 aa, synthetic construct
  REGION 1..9: note = Description of Artificial Sequence: Synthetic peptide
DGTLAVTFK

SEQ ID NO: 422 - protein, 9 aa, synthetic construct
  REGION 1..9: note = Description of Artificial Sequence: Synthetic peptide
DGTLAVPIK

SEQ ID NO: 423 - protein, 9 aa, synthetic construct
  REGION 1..9: note = Description of Artificial Sequence: Synthetic peptide
DGTLEVTFK

SEQ ID NO: 424 - protein, 9 aa, synthetic construct
  REGION 1..9: note = Description of Artificial Sequence: Synthetic peptide
ERTLAVPFK

SEQ ID NO: 425 - protein, 9 aa, synthetic construct
  REGION 1..9: note = Description of Artificial Sequence: Synthetic peptide
SGSLAVPFK

SEQ ID NO: 426 - protein, 9 aa, synthetic construct
  REGION 1..9: note = Description of Artificial Sequence: Synthetic peptide
GGTRNTAPM

SEQ ID NO: 427 - protein, 9 aa, synthetic construct
  REGION 1..9: note = Description of Artificial Sequence: Synthetic peptide
DGNSYVPPR

SEQ ID NO: 428 - protein, 9 aa, synthetic construct
  REGION 1..9: note = Description of Artificial Sequence: Synthetic peptide
AQAGVSGQR

SEQ ID NO: 429 - protein, 9 aa, synthetic construct
  REGION 1..9: note = Description of Artificial Sequence: Synthetic peptide
AQAGNSNAV

SEQ ID NO: 430 - protein, 9 aa, synthetic construct
  REGION 1..9: note = Description of Artificial Sequence: Synthetic peptide
AQWVYGQTV

SEQ ID NO: 431 - protein, 9 aa, synthetic construct
  REGION 1..9: note = Description of Artificial Sequence: Synthetic peptide
DGTSFSPPK

SEQ ID NO: 432 - protein, 9 aa, synthetic construct
  REGION 1..9: note = Description of Artificial Sequence: Synthetic peptide
AQGLDLGRW

SEQ ID NO: 433 - protein, 9 aa, synthetic construct
  REGION 1..9: note = Description of Artificial Sequence: Synthetic peptide
AQVMSGVGQ

SEQ ID NO: 434 - protein, 9 aa, synthetic construct
  REGION 1..9: note = Description of Artificial Sequence: Synthetic peptide
DGTHGLRGW

SEQ ID NO: 435 - protein, 9 aa, synthetic construct
  REGION 1..9: note = Description of Artificial Sequence: Synthetic peptide
AQRWAADSS

SEQ ID NO: 436 - protein, 9 aa, synthetic construct
  REGION 1..9: note = Description of Artificial Sequence: Synthetic peptide
AQTGASGAT

SEQ ID NO: 437 - protein, 9 aa, synthetic construct
  REGION 1..9: note = Description of Artificial Sequence: Synthetic peptide
AQLVAGYSQ

SEQ ID NO: 438 - protein, 9 aa, synthetic construct
  REGION 1..9: note = Description of Artificial Sequence: Synthetic peptide
AQSLARLFP

SEQ ID NO: 439 - DNA, 18 bp, synthetic construct
  misc_feature 1..18: note = Description of Artificial Sequence: Synthetic oligonucleotide
  source 1..18: mol_type = other DNA
cagagtgctcaggcacag

SEQ ID NO: 440 - DNA, 39 bp, synthetic construct
  misc_feature 1..39: note = Description of Artificial Sequence: Synthetic oligonucleotide
  source 1..39: mol_type = other DNA
cagagtgcccaagcgggtgcggggtcggagcgggcacag

SEQ ID NO: 441 - DNA, 39 bp, synthetic construct
  misc_feature 1..39: note = Description of Artificial Sequence: Synthetic oligonucleotide
  source 1..39: mol_type = other DNA
cagagtgcccaagatcagaatccggggcgttgggcacag

SEQ ID NO: 442 - DNA, 39 bp, synthetic construct
  misc_feature 1..39: note = Description of Artificial Sequence: Synthetic oligonucleotide
  source 1..39: mol_type = other DNA
cagagtgcccaagagttgacgcgtccgtttttggcacag

SEQ ID NO: 443 - DNA, 39 bp, synthetic construct
  misc_feature 1..39: note = Description of Artificial Sequence: Synthetic oligonucleotide
  source 1..39: mol_type = other DNA
cagagtgcccaagaggtgcctgggtataggtgggcacag

SEQ ID NO: 444 - DNA, 39 bp, synthetic construct
  misc_feature 1..39: note = Description of Artificial Sequence: Synthetic oligonucleotide
  source 1..39: mol_type = other DNA
cagagtgcccaatttcctacgaattatgattctgcacag

SEQ ID NO: 445 - DNA, 39 bp, synthetic construct
  misc_feature 1..39: note = Description of Artificial Sequence: Synthetic oligonucleotide
  source 1..39: mol_type = other DNA
cagagtgcccaatttgtggttggtcagcagtatgcacag

SEQ ID NO: 446 - DNA, 39 bp, synthetic construct
  misc_feature 1..39: note = Description of Artificial Sequence: Synthetic oligonucleotide
  source 1..39: mol_type = other DNA
cagagtgcccaaggggctagtccggggcggtgggcacag

SEQ ID NO: 447 - DNA, 39 bp, synthetic construct
  misc_feature 1..39: note = Description of Artificial Sequence: Synthetic oligonucleotide
  source 1..39: mol_type = other DNA
cagagtgcccaaggggagaatccgggtaggtgggcacag

SEQ ID NO: 448 - DNA, 39 bp, synthetic construct
  misc_feature 1..39: note = Description of Artificial Sequence: Synthetic oligonucleotide
  source 1..39: mol_type = other DNA
cagagtgcccaaggggggaatccgggtcggtgggcacag

SEQ ID NO: 449 - DNA, 39 bp, synthetic construct
  misc_feature 1..39: note = Description of Artificial Sequence: Synthetic oligonucleotide
  source 1..39: mol_type = other DNA
cagagtgcccaaggtggttctacggggtcgaatgcacag

SEQ ID NO: 450 - DNA, 39 bp, synthetic construct
  misc_feature 1..39: note = Description of Artificial Sequence: Synthetic oligonucleotide
  source 1..39: mol_type = other DNA
cagagtgcccaagggccgactaggccgtttttggcacag

SEQ ID NO: 451 - DNA, 39 bp, synthetic construct
  misc_feature 1..39: note = Description of Artificial Sequence: Synthetic oligonucleotide
  source 1..39: mol_type = other DNA
cagagtgcccaaggtcgggatggttgggcggcggcacag

SEQ ID NO: 452 - DNA, 39 bp, synthetic construct
  misc_feature 1..39: note = Description of Artificial Sequence: Synthetic oligonucleotide
  source 1..39: mol_type = other DNA
cagagtgcccaaggtcgtatgactgattcgcaggcacag

SEQ ID NO: 453 - DNA, 39 bp, synthetic construct
  misc_feature 1..39: note = Description of Artificial Sequence: Synthetic oligonucleotide
  source 1..39: mol_type = other DNA
cagagtgcccaaggtagtgatgtggggcggtgggcacag

SEQ ID NO: 454 - DNA, 39 bp, synthetic construct
  misc_feature 1..39: note = Description of Artificial Sequence: Synthetic oligonucleotide
  source 1..39: mol_type = other DNA
cagagtgcccaaggtagtaatccggggaggtgggcacag

SEQ ID NO: 455 - DNA, 39 bp, synthetic construct
  misc_feature 1..39: note = Description of Artificial Sequence: Synthetic oligonucleotide
  source 1..39: mol_type = other DNA
cagagtgcccaagggtctaattcgcctcaggtggcacag

SEQ ID NO: 456 - DNA, 39 bp, synthetic construct
  misc_feature 1..39: note = Description of Artificial Sequence: Synthetic oligonucleotide
  source 1..39: mol_type = other DNA
cagagtgcccaaggttcgtggaatccgccggcggcacag

SEQ ID NO: 457 - DNA, 39 bp, synthetic construct
  misc_feature 1..39: note = Description of Artificial Sequence: Synthetic oligonucleotide
  source 1..39: mol_type = other DNA
cagagtgcccaaggtacttggaatccgccggctgcacag

SEQ ID NO: 458 - DNA, 39 bp, synthetic construct
  misc_feature 1..39: note = Description of Artificial Sequence: Synthetic oligonucleotide
  source 1..39: mol_type = other DNA
cagagtgcccaaggtgtttttattccgccgaaggcacag

SEQ ID NO: 459 - DNA, 39 bp, synthetic construct
  misc_feature 1..39: note = Description of Artificial Sequence: Synthetic oligonucleotide
  source 1..39: mol_type = other DNA
cagagtgcccaacatgtgaatgcttctcagtctgcacag

SEQ ID NO: 460 - DNA, 39 bp, synthetic construct
  misc_feature 1..39: note = Description of Artificial Sequence: Synthetic oligonucleotide
  source 1..39: mol_type = other DNA
cagagtgcccaaattaaggcggggtgggcgcaggcacag

SEQ ID NO: 461 - DNA, 39 bp, synthetic construct
  misc_feature 1..39: note = Description of Artificial Sequence: Synthetic oligonucleotide
  source 1..39: mol_type = other DNA
cagagtgcccaaattatgagtgggtatgctcaggcacag

SEQ ID NO: 462 - DNA, 39 bp, synthetic construct
  misc_feature 1..39: note = Description of Artificial Sequence: Synthetic oligonucleotide
  source 1..39: mol_type = other DNA
cagagtgcccaaaagagtgtgggtagtgtttatgcacag

SEQ ID NO: 463 - DNA, 39 bp, synthetic construct
  misc_feature 1..39: note = Description of Artificial Sequence: Synthetic oligonucleotide
  source 1..39: mol_type = other DNA
cagagtgcccaacttgagcatgggtttgctcaggcacag

SEQ ID NO: 464 - DNA, 39 bp, synthetic construct
  misc_feature 1..39: note = Description of Artificial Sequence: Synthetic oligonucleotide
  source 1..39: mol_type = other DNA
cagagtgcccaactgggtggggtgttgagtgctgcacag

SEQ ID NO: 465 - DNA, 39 bp, synthetic construct
  misc_feature 1..39: note = Description of Artificial Sequence: Synthetic oligonucleotide
  source 1..39: mol_type = other DNA
cagagtgcccaactggggctttcgcaggggcgggcacag

SEQ ID NO: 466 - DNA, 39 bp, synthetic construct
  misc_feature 1..39: note = Description of Artificial Sequence: Synthetic oligonucleotide
  source 1..39: mol_type = other DNA
cagagtgcccaattggggtatgggtttgctcaggcacag

SEQ ID NO: 467 - DNA, 39 bp, synthetic construct
  misc_feature 1..39: note = Description of Artificial Sequence: Synthetic oligonucleotide
  source 1..39: mol_type = other DNA
cagagtgcccaattgaagtatggtcttgcgcaggcacag

SEQ ID NO: 468 - DNA, 39 bp, synthetic construct
  misc_feature 1..39: note = Description of Artificial Sequence: Synthetic oligonucleotide
  source 1..39: mol_type = other DNA
cagagtgcccaacttcggattggttttgctcaggcacag

SEQ ID NO: 469 - DNA, 39 bp, synthetic construct
  misc_feature 1..39: note = Description of Artificial Sequence: Synthetic oligonucleotide
  source 1..39: mol_type = other DNA
cagagtgcccaattgcgtatgggttatagtcaggcacag

SEQ ID NO: 470 - DNA, 39 bp, synthetic construct
  misc_feature 1..39: note = Description of Artificial Sequence: Synthetic oligonucleotide
  source 1..39: mol_type = other DNA
cagagtgcccaactgaggcaggggtatgctcaggcacag

SEQ ID NO: 471 - DNA, 39 bp, synthetic construct
  misc_feature 1..39: note = Description of Artificial Sequence: Synthetic oligonucleotide
  source 1..39: mol_type = other DNA
cagagtgcccaattgcgtgttggttttgcgcaggcacag

SEQ ID NO: 472 - DNA, 39 bp, synthetic construct
  misc_feature 1..39: note = Description of Artificial Sequence: Synthetic oligonucleotide
  source 1..39: mol_type = other DNA
cagagtgcccaactgtcgtgtcggagtcagatggcacag

SEQ ID NO: 473 - DNA, 39 bp, synthetic construct
  misc_feature 1..39: note = Description of Artificial Sequence: Synthetic oligonucleotide
  source 1..39: mol_type = other DNA
cagagtgcccaattgacgtatagtcagtcgctggcacag

SEQ ID NO: 474 - DNA, 39 bp, synthetic construct
  misc_feature 1..39: note = Description of Artificial Sequence: Synthetic oligonucleotide
  source 1..39: mol_type = other DNA
cagagtgcccaactgtataagggttatagtcaggcacag

SEQ ID NO: 475 - DNA, 39 bp, synthetic construct
  misc_feature 1..39: note = Description of Artificial Sequence: Synthetic oligonucleotide
  source 1..39: mol_type = other DNA
cagagtgcccaaatgcctcagcggccgtttttggcacag

SEQ ID NO: 476 - DNA, 39 bp, synthetic construct
  misc_feature 1..39: note = Description of Artificial Sequence: Synthetic oligonucleotide
  source 1..39: mol_type = other DNA
cagagtgcccaaaatggtaatccggggcggtgggcacag

SEQ ID NO: 477 - DNA, 39 bp, synthetic construct
  misc_feature 1..39: note = Description of Artificial Sequence: Synthetic oligonucleotide
  source 1..39: mol_type = other DNA
cagagtgcccaacctgagggtagtgcgaggtgggcacag

SEQ ID NO: 478 - DNA, 39 bp, synthetic construct
  misc_feature 1..39: note = Description of Artificial Sequence: Synthetic oligonucleotide
  source 1..39: mol_type = other DNA
cagagtgcccaaccgttggctgtttatggggcggcacag

SEQ ID NO: 479 - DNA, 39 bp, synthetic construct
  misc_feature 1..39: note = Description of Artificial Sequence: Synthetic oligonucleotide
  source 1..39: mol_type = other DNA
cagagtgcccaaccgcagtcgtcgtcgatgagtgcacag

SEQ ID NO: 480 - DNA, 39 bp, synthetic construct
  misc_feature 1..39: note = Description of Artificial Sequence: Synthetic oligonucleotide
  source 1..39: mol_type = other DNA
cagagtgcccaaccgagtgtgggtgggtattgggcacag

SEQ ID NO: 481 - DNA, 39 bp, synthetic construct
  misc_feature 1..39: note = Description of Artificial Sequence: Synthetic oligonucleotide
  source 1..39: mol_type = other DNA
cagagtgcccaacaggctgtgggtcagtcttgggcacag

SEQ ID NO: 482 - DNA, 39 bp, synthetic construct
  misc_feature 1..39: note = Description of Artificial Sequence: Synthetic oligonucleotide
  source 1..39: mol_type = other DNA
cagagtgcccaacagcgttcgctggcttcgggtgcacag

SEQ ID NO: 483 - DNA, 39 bp, synthetic construct
  misc_feature 1..39: note = Description of Artificial Sequence: Synthetic oligonucleotide
  source 1..39: mol_type = other DNA
cagagtgcccaacaggtgatgaatagtcagggggcacag

SEQ ID NO: 484 - DNA, 39 bp, synthetic construct
  misc_feature 1..39: note = Description of Artificial Sequence: Synthetic oligonucleotide
  source 1..39: mol_type = other DNA
cagagtgcccaacgtggggttgggttgagtcaggcacag

SEQ ID NO: 485 - DNA, 39 bp, synthetic construct
  misc_feature 1..39: note = Description of Artificial Sequence: Synthetic oligonucleotide
  source 1..39: mol_type = other DNA
cagagtgcccaaaggcatgatgcggagggtagtgcacag

SEQ ID NO: 486 - DNA, 39 bp, synthetic construct
  misc_feature 1..39: note = Description of Artificial Sequence: Synthetic oligonucleotide
  source 1..39: mol_type = other DNA
cagagtgcccaacgtaagggggagcctcattatgcacag

SEQ ID NO: 487 - DNA, 39 bp, synthetic construct
  misc_feature 1..39: note = Description of Artificial Sequence: Synthetic oligonucleotide
  source 1..39: mol_type = other DNA
cagagtgcccaaaggtatacgggggattctagtgcacag

SEQ ID NO: 488 - DNA, 39 bp, synthetic construct
  misc_feature 1..39: note = Description of Artificial Sequence: Synthetic oligonucleotide
  source 1..39: mol_type = other DNA
cagagtgcccaatcggcgatggctgcgaagggtgcacag

SEQ ID NO: 489 - DNA, 39 bp, synthetic construct
  misc_feature 1..39: note = Description of Artificial Sequence: Synthetic oligonucleotide
  source 1..39: mol_type = other DNA
cagagtgcccaatctgggggtcttacggggagtgcacag

SEQ ID NO: 490 - DNA, 39 bp, synthetic construct
  misc_feature 1..39: note = Description of Artificial Sequence: Synthetic oligonucleotide
  source 1..39: mol_type = other DNA
cagagtgcccaatcgggtggggtggggcaggtggcacag

SEQ ID NO: 491 - DNA, 39 bp, synthetic construct
  misc_feature 1..39: note = Description of Artificial Sequence: Synthetic oligonucleotide
  source 1..39: mol_type = other DNA
cagagtgcccaatctctggcgacgccttttcgtgcacag

SEQ ID NO: 492 - DNA, 39 bp, synthetic construct
  misc_feature 1..39: note = Description of Artificial Sequence: Synthetic oligonucleotide
  source 1..39: mol_type = other DNA
cagagtgcccaaagtatgtcgcgtccgtttctggcacag

SEQ ID NO: 493 - DNA, 39 bp, synthetic construct
  misc_feature 1..39: note = Description of Artificial Sequence: Synthetic oligonucleotide
  source 1..39: mol_type = other DNA
cagagtgcccaaagtcagcttaggccgtttcttgcacag

SEQ ID NO: 494 - DNA, 39 bp, synthetic construct
  misc_feature 1..39: note = Description of Artificial Sequence: Synthetic oligonucleotide
  source 1..39: mol_type = other DNA
cagagtgcccaatctgtggctaagccttttttggcacag

SEQ ID NO: 495 - DNA, 39 bp, synthetic construct
  misc_feature 1..39: note = Description of Artificial Sequence: Synthetic oligonucleotide
  source 1..39: mol_type = other DNA
cagagtgcccaatcggtttcgcagccgtttagggcacag

SEQ ID NO: 496 - DNA, 39 bp, synthetic construct
  misc_feature 1..39: note = Description of Artificial Sequence: Synthetic oligonucleotide
  source 1..39: mol_type = other DNA
cagagtgcccaatctgtggtgcgtccttttctggcacag

SEQ ID NO: 497 - DNA, 39 bp, synthetic construct
  misc_feature 1..39: note = Description of Artificial Sequence: Synthetic oligonucleotide
  source 1..39: mol_type = other DNA
cagagtgcccaaactgcgctttcgtcgtcgacggcacag

SEQ ID NO: 498 - DNA, 39 bp, synthetic construct
  misc_feature 1..39: note = Description of Artificial Sequence: Synthetic oligonucleotide
  source 1..39: mol_type = other DNA
cagagtgcccaaacggagatgggtgggaggtgtgcacag

SEQ ID NO: 499 - DNA, 39 bp, synthetic construct
  misc_feature 1..39: note = Description of Artificial Sequence: Synthetic oligonucleotide
  source 1..39: mol_type = other DNA
cagagtgcccaaacggggtttgctccgccgcgtgcacag

SEQ ID NO: 500 - DNA, 39 bp, synthetic construct
  misc_feature 1..39: note = Description of Artificial Sequence: Synthetic oligonucleotide
  source 1..39: mol_type = other DNA
cagagtgcccaaacgattcgggggtattcgtctgcacag

SEQ ID NO: 501 - DNA, 39 bp, synthetic construct
  misc_feature 1..39: note = Description of Artificial Sequence: Synthetic oligonucleotide
  source 1..39: mol_type = other DNA
cagagtgcccaaactatttctaattatcatacggcacag

SEQ ID NO: 502 - DNA, 39 bp, synthetic construct
  misc_feature 1..39: note = Description of Artificial Sequence: Synthetic oligonucleotide
  source 1..39: mol_type = other DNA
cagagtgcccaaactttggcgcgtccgtttgtggcacag

SEQ ID NO: 503 - DNA, 39 bp, synthetic construct
  misc_feature 1..39: note = Description of Artificial Sequence: Synthetic oligonucleotide
  source 1..39: mol_type = other DNA
cagagtgcccaaactttggcggtgccttttaaggcacag

SEQ ID NO: 504 - DNA, 39 bp, synthetic construct
  misc_feature 1..39: note = Description of Artificial Sequence: Synthetic oligonucleotide
  source 1..39: mol_type = other DNA
cagagtgcccaaactcctgatcgtccttggttggcacag

SEQ ID NO: 505 - DNA, 39 bp, synthetic construct
  misc_feature 1..39: note = Description of Artificial Sequence: Synthetic oligonucleotide
  source 1..39: mol_type = other DNA
cagagtgcccaaactcgggctgggtatgctcaggcacag

SEQ ID NO: 506 - DNA, 39 bp, synthetic construct
  misc_feature 1..39: note = Description of Artificial Sequence: Synthetic oligonucleotide
  source 1..39: mol_type = other DNA
cagagtgcccaaactagggcggggtattctcaggcacag

SEQ ID NO: 507 - DNA, 39 bp, synthetic construct
  misc_feature 1..39: note = Description of Artificial Sequence: Synthetic oligonucleotide
  source 1..39: mol_type = other DNA
cagagtgcccaaacgcgtgagtatctgctgggggcacag

SEQ ID NO: 508 - DNA, 39 bp, synthetic construct
  misc_feature 1..39: note = Description of Artificial Sequence: Synthetic oligonucleotide
  source 1..39: mol_type = other DNA
cagagtgcccaaacttctgcgaagccgtttcttgcacag

SEQ ID NO: 509 - DNA, 39 bp, synthetic construct
  misc_feature 1..39: note = Description of Artificial Sequence: Synthetic oligonucleotide
  source 1..39: mol_type = other DNA
cagagtgcccaaacttctgctaggccttttctggcacag

SEQ ID NO: 510 - DNA, 39 bp, synthetic construct
  misc_feature 1..39: note = Description of Artificial Sequence: Synthetic oligonucleotide
  source 1..39: mol_type = other DNA
cagagtgcccaaactactgataggccttttttggcacag

SEQ ID NO: 511 - DNA, 39 bp, synthetic construct
  misc_feature 1..39: note = Description of Artificial Sequence: Synthetic oligonucleotide
  source 1..39: mol_type = other DNA
cagagtgcccaaacgactgagaagccgtggctggcacag

SEQ ID NO: 512 - DNA, 39 bp, synthetic construct
  misc_feature 1..39: note = Description of Artificial Sequence: Synthetic oligonucleotide
  source 1..39: mol_type = other DNA
cagagtgcccaaacggttgcgcggcctttttatgcacag

SEQ ID NO: 513 - DNA, 39 bp, synthetic construct
  misc_feature 1..39: note = Description of Artificial Sequence: Synthetic oligonucleotide
  source 1..39: mol_type = other DNA
cagagtgcccaaactgttgctacgccgtttagggcacag

SEQ ID NO: 514 - DNA, 39 bp, synthetic construct
  misc_feature 1..39: note = Description of Artificial Sequence: Synthetic oligonucleotide
  source 1..39: mol_type = other DNA
cagagtgcccaaacggtgacgcagttgtttaaggcacag

SEQ ID NO: 515 - DNA, 39 bp, synthetic construct
  misc_feature 1..39: note = Description of Artificial Sequence: Synthetic oligonucleotide
  source 1..39: mol_type = other DNA
cagagtgcccaagttcatgttgggagtgtttatgcacag

SEQ ID NO: 516 - DNA, 39 bp, synthetic construct
  misc_feature 1..39: note = Description of Artificial Sequence: Synthetic oligonucleotide
  source 1..39: mol_type = other DNA
cagagtgcccaagttcttgctgggtataatatggcacag

SEQ ID NO: 517 - DNA, 39 bp, synthetic construct
  misc_feature 1..39: note = Description of Artificial Sequence: Synthetic oligonucleotide
  source 1..39: mol_type = other DNA
cagagtgcccaagtttctgaggcgagggttagggcacag

SEQ ID NO: 518 - DNA, 39 bp, synthetic construct
  misc_feature 1..39: note = Description of Artificial Sequence: Synthetic oligonucleotide
  source 1..39: mol_type = other DNA
cagagtgcccaagttgtggtgggttatagtcaggcacag

SEQ ID NO: 519 - DNA, 39 bp, synthetic construct
  misc_feature 1..39: note = Description of Artificial Sequence: Synthetic oligonucleotide
  source 1..39: mol_type = other DNA
cagagtgcccaatgggctgctgggtataatgtggcacag

SEQ ID NO: 520 - DNA, 39 bp, synthetic construct
  misc_feature 1..39: note = Description of Artificial Sequence: Synthetic oligonucleotide
  source 1..39: mol_type = other DNA
cagagtgcccaatgggagctgagtaatgggtatgcacag

SEQ ID NO: 521 - DNA, 39 bp, synthetic construct
  misc_feature 1..39: note = Description of Artificial Sequence: Synthetic oligonucleotide
  source 1..39: mol_type = other DNA
cagagtgcccaatgggaggtgaaggggggttatgcacag

SEQ ID NO: 522 - DNA, 39 bp, synthetic construct
  misc_feature 1..39: note = Description of Artificial Sequence: Synthetic oligonucleotide
  source 1..39: mol_type = other DNA
cagagtgcccaatgggaggtgaagcgggggtatgcacag

SEQ ID NO: 523 - DNA, 39 bp, synthetic construct
  misc_feature 1..39: note = Description of Artificial Sequence: Synthetic oligonucleotide
  source 1..39: mol_type = other DNA
cagagtgcccaatgggaggttcagtctgggtttgcacag

SEQ ID NO: 524 - DNA, 39 bp, synthetic construct
  misc_feature 1..39: note = Description of Artificial Sequence: Synthetic oligonucleotide
  source 1..39: mol_type = other DNA
cagagtgcccaatgggaggttcgtggtggttatgcacag

SEQ ID NO: 525 - DNA, 39 bp, synthetic construct
  misc_feature 1..39: note = Description of Artificial Sequence: Synthetic oligonucleotide
  source 1..39: mol_type = other DNA
cagagtgcccaatgggaggtgacgagtggttgggcacag

SEQ ID NO: 526 - DNA, 39 bp, synthetic construct
  misc_feature 1..39: note = Description of Artificial Sequence: Synthetic oligonucleotide
  source 1..39: mol_type = other DNA
cagagtgcccaatggggggcgccgagtcatggggcacag

SEQ ID NO: 527 - DNA, 39 bp, synthetic construct
  misc_feature 1..39: note = Description of Artificial Sequence: Synthetic oligonucleotide
  source 1..39: mol_type = other DNA
cagagtgcccaatggatggagcttggtagttcggcacag

SEQ ID NO: 528 - DNA, 39 bp, synthetic construct
  misc_feature 1..39: note = Description of Artificial Sequence: Synthetic oligonucleotide
  source 1..39: mol_type = other DNA
cagagtgcccaatggatgtttgggggtagtggggcacag

SEQ ID NO: 529 - DNA, 39 bp, synthetic construct
  misc_feature 1..39: note = Description of Artificial Sequence: Synthetic oligonucleotide
  source 1..39: mol_type = other DNA
cagagtgcccaatggatgctggggggggcgcaggcacag

SEQ ID NO: 530 - DNA, 39 bp, synthetic construct
  misc_feature 1..39: note = Description of Artificial Sequence: Synthetic oligonucleotide
  source 1..39: mol_type = other DNA
cagagtgcccaatggccgactgcttatgatgcggcacag

SEQ ID NO: 531 - DNA, 39 bp, synthetic construct
  misc_feature 1..39: note = Description of Artificial Sequence: Synthetic oligonucleotide
  source 1..39: mol_type = other DNA
cagagtgcccaatggcctacgagttatgatgctgcacag

SEQ ID NO: 532 - DNA, 39 bp, synthetic construct
  misc_feature 1..39: note = Description of Artificial Sequence: Synthetic oligonucleotide
  source 1..39: mol_type = other DNA
cagagtgcccaatggcaggttcagacggggtttgcacag

SEQ ID NO: 533 - DNA, 39 bp, synthetic construct
  misc_feature 1..39: note = Description of Artificial Sequence: Synthetic oligonucleotide
  source 1..39: mol_type = other DNA
cagagtgcccaatggtcgactgagggtgggtatgcacag

SEQ ID NO: 534 - DNA, 39 bp, synthetic construct
  misc_feature 1..39: note = Description of Artificial Sequence: Synthetic oligonucleotide
  source 1..39: mol_type = other DNA
cagagtgcccaatggactgctgcgggtggttatgcacag

SEQ ID NO: 535 - DNA, 39 bp, synthetic construct
  misc_feature 1..39: note = Description of Artificial Sequence: Synthetic oligonucleotide
  source 1..39: mol_type = other DNA
cagagtgcccaatggacgacggagtcgggttatgcacag

SEQ ID NO: 536 - DNA, 39 bp, synthetic construct
  misc_feature 1..39: note = Description of Artificial Sequence: Synthetic oligonucleotide
  source 1..39: mol_type = other DNA
cagagtgcccaatgggtttatgggagttcgcatgcacag

SEQ ID NO: 537 - DNA, 39 bp, synthetic construct
  misc_feature 1..39: note = Description of Artificial Sequence: Synthetic oligonucleotide
  source 1..39: mol_type = other DNA
cagagtgcccaatatttggcggggtatacggtggcacag

SEQ ID NO: 538 - DNA, 39 bp, synthetic construct
  misc_feature 1..39: note = Description of Artificial Sequence: Synthetic oligonucleotide
  source 1..39: mol_type = other DNA
cagagtgcccaatatctgaaggggtattctgtggcacag

SEQ ID NO: 539 - DNA, 39 bp, synthetic construct
  misc_feature 1..39: note = Description of Artificial Sequence: Synthetic oligonucleotide
  source 1..39: mol_type = other DNA
cagagtgcccaatatttgtcgggttataatacggcacag

SEQ ID NO: 540 - DNA, 39 bp, synthetic construct
  misc_feature 1..39: note = Description of Artificial Sequence: Synthetic oligonucleotide
  source 1..39: mol_type = other DNA
cagagtgatggcgctgcggcgactactgggtgggcacag

SEQ ID NO: 541 - DNA, 39 bp, synthetic construct
  misc_feature 1..39: note = Description of Artificial Sequence: Synthetic oligonucleotide
  source 1..39: mol_type = other DNA
cagagtgatggcgcgggtgggacgagtggttgggcacag

SEQ ID NO: 542 - DNA, 39 bp, synthetic construct
  misc_feature 1..39: note = Description of Artificial Sequence: Synthetic oligonucleotide
  source 1..39: mol_type = other DNA
cagagtgatggcgcgggtactacttcgggttgggcacag

SEQ ID NO: 543 - DNA, 39 bp, synthetic construct
  misc_feature 1..39: note = Description of Artificial Sequence: Synthetic oligonucleotide
  source 1..39: mol_type = other DNA
cagagtgatggcgctcatgggctgtcggggtgggcacag

SEQ ID NO: 544 - DNA, 39 bp, synthetic construct
  misc_feature 1..39: note = Description of Artificial Sequence: Synthetic oligonucleotide
  source 1..39: mol_type = other DNA
cagagtgatggcgctcatgttgggctgtcgtcggcacag

SEQ ID NO: 545 - DNA, 39 bp, synthetic construct
  misc_feature 1..39: note = Description of Artificial Sequence: Synthetic oligonucleotide
  source 1..39: mol_type = other DNA
cagagtgatggcgctcggacggtgcttcagttggcacag

SEQ ID NO: 546 - DNA, 39 bp, synthetic construct
  misc_feature 1..39: note = Description of Artificial Sequence: Synthetic oligonucleotide
  source 1..39: mol_type = other DNA
cagagtgatggcgagtatcagaagccgtttagggcacag

SEQ ID NO: 547 - DNA, 39 bp, synthetic construct
  misc_feature 1..39: note = Description of Artificial Sequence: Synthetic oligonucleotide
  source 1..39: mol_type = other DNA
cagagtgatggcggtgggactacgacggggtgggcacag

SEQ ID NO: 548 - DNA, 39 bp, synthetic construct
  misc_feature 1..39: note = Description of Artificial Sequence: Synthetic oligonucleotide
  source 1..39: mol_type = other DNA
cagagtgatggccatgcgacgagtatgggttgggcacag

SEQ ID NO: 549 - DNA, 39 bp, synthetic construct
  misc_feature 1..39: note = Description of Artificial Sequence: Synthetic oligonucleotide
  source 1..39: mol_type = other DNA
cagagtgatggcaagggttcgacgcaggggtgggcacag

SEQ ID NO: 550 - DNA, 39 bp, synthetic construct
  misc_feature 1..39: note = Description of Artificial Sequence: Synthetic oligonucleotide
  source 1..39: mol_type = other DNA
cagagtgatggcaagcagtatcagctgtcttcggcacag

SEQ ID NO: 551 - DNA, 39 bp, synthetic construct
  misc_feature 1..39: note = Description of Artificial Sequence: Synthetic oligonucleotide
  source 1..39: mol_type = other DNA
cagagtgatggcaatggtgggttgaaggggtgggcacag

SEQ ID NO: 552 - DNA, 39 bp, synthetic construct
  misc_feature 1..39: note = Description of Artificial Sequence: Synthetic oligonucleotide
  source 1..39: mol_type = other DNA
cagagtgatggccaggggggtttgtctgggtgggcacag

SEQ ID NO: 553 - DNA, 39 bp, synthetic construct
  misc_feature 1..39: note = Description of Artificial Sequence: Synthetic oligonucleotide
  source 1..39: mol_type = other DNA
cagagtgatggccagcattttgctccgccgcgggcacag

SEQ ID NO: 554 - DNA, 39 bp, synthetic construct
  misc_feature 1..39: note = Description of Artificial Sequence: Synthetic oligonucleotide
  source 1..39: mol_type = other DNA
cagagtgatggccgtgcgactaagacgctttatgcacag

SEQ ID NO: 555 - DNA, 39 bp, synthetic construct
  misc_feature 1..39: note = Description of Artificial Sequence: Synthetic oligonucleotide
  source 1..39: mol_type = other DNA
cagagtgatggccgtaatgcgttgacggggtgggcacag

SEQ ID NO: 556 - DNA, 39 bp, synthetic construct
  misc_feature 1..39: note = Description of Artificial Sequence: Synthetic oligonucleotide
  source 1..39: mol_type = other DNA
cagagtgatggcaggaggcaggtgattcagctggcacag

SEQ ID NO: 557 - DNA, 39 bp, synthetic construct
  misc_feature 1..39: note = Description of Artificial Sequence: Synthetic oligonucleotide
  source 1..39: mol_type = other DNA
cagagtgatggcagggtttatggtctttcgtcggcacag

SEQ ID NO: 558 - DNA, 39 bp, synthetic construct
  misc_feature 1..39: note = Description of Artificial Sequence: Synthetic oligonucleotide
  source 1..39: mol_type = other DNA
cagagtgatggcagtgggcgtacgacgggttgggcacag

SEQ ID NO: 559 - DNA, 39 bp, synthetic construct
  misc_feature 1..39: note = Description of Artificial Sequence: Synthetic oligonucleotide
  source 1..39: mol_type = other DNA
cagagtgatggctctggtacgacgcggggttgggcacag

SEQ ID NO: 560 - DNA, 39 bp, synthetic construct
  misc_feature 1..39: note = Description of Artificial Sequence: Synthetic oligonucleotide
  source 1..39: mol_type = other DNA
cagagtgatggctcgggtacggttagtgggtgggcacag

SEQ ID NO: 561 - DNA, 39 bp, synthetic construct
  misc_feature 1..39: note = Description of Artificial Sequence: Synthetic oligonucleotide
  source 1..39: mol_type = other DNA
cagagtgatggcagtccggagaagccgtttcgggcacag

SEQ ID NO: 562 - DNA, 39 bp, synthetic construct
  misc_feature 1..39: note = Description of Artificial Sequence: Synthetic oligonucleotide
  source 1..39: mol_type = other DNA
cagagtgatggcagtcagtctactacggggtgggcacag

SEQ ID NO: 563 - DNA, 39 bp, synthetic construct
  misc_feature 1..39: note = Description of Artificial Sequence: Synthetic oligonucleotide
  source 1..39: mol_type = other DNA
cagagtgatggcagtagtttttatcctcctaaggcacag

SEQ ID NO: 564 - DNA, 39 bp, synthetic construct
  misc_feature 1..39: note = Description of Artificial Sequence: Synthetic oligonucleotide
  source 1..39: mol_type = other DNA
cagagtgatggcagtagttcttattatgatgcggcacag

SEQ ID NO: 565 - DNA, 39 bp, synthetic construct
  misc_feature 1..39: note = Description of Artificial Sequence: Synthetic oligonucleotide
  source 1..39: mol_type = other DNA
cagagtgatggctctacggagaggccgtttagggcacag

SEQ ID NO: 566 - DNA, 39 bp, synthetic construct
  misc_feature 1..39: note = Description of Artificial Sequence: Synthetic oligonucleotide
  source 1..39: mol_type = other DNA
cagagtgatggcaccgcggctcggctgtcgtcggcacag

SEQ ID NO: 567 - DNA, 39 bp, synthetic construct
  misc_feature 1..39: note = Description of Artificial Sequence: Synthetic oligonucleotide
  source 1..39: mol_type = other DNA
cagagtgatggcaccgctgataagccgtttcgggcacag

SEQ ID NO: 568 - DNA, 39 bp, synthetic construct
  misc_feature 1..39: note = Description of Artificial Sequence: Synthetic oligonucleotide
  source 1..39: mol_type = other DNA
cagagtgatggcacggcggatcgtccttttcgggcacag

SEQ ID NO: 569 - DNA, 39 bp, synthetic construct
  misc_feature 1..39: note = Description of Artificial Sequence: Synthetic oligonucleotide
  source 1..39: mol_type = other DNA
cagagtgatggcaccgcggagaggccttttagggcacag

SEQ ID NO: 570 - DNA, 39 bp, synthetic construct
  misc_feature 1..39: note = Description of Artificial Sequence: Synthetic oligonucleotide
  source 1..39: mol_type = other DNA
cagagtgatggcaccgcgattcatctttcgtctgcacag

SEQ ID NO: 571 - DNA, 39 bp, synthetic construct
  misc_feature 1..39: note = Description of Artificial Sequence: Synthetic oligonucleotide
  source 1..39: mol_type = other DNA
cagagtgatggcaccgcgatttatctgtcttctgcacag

SEQ ID NO: 572 - DNA, 39 bp, synthetic construct
  misc_feature 1..39: note = Description of Artificial Sequence: Synthetic oligonucleotide
  source 1..39: mol_type = other DNA
cagagtgatggcaccgctcttatgttgtcgtctgcacag

SEQ ID NO: 573 - DNA, 39 bp, synthetic construct
  misc_feature 1..39: note = Description of Artificial Sequence: Synthetic oligonucleotide
  source 1..39: mol_type = other DNA
cagagtgatggcaccgcgagtattagtggttgggcacag

SEQ ID NO: 574 - DNA, 39 bp, synthetic construct
  misc_feature 1..39: note = Description of Artificial Sequence: Synthetic oligonucleotide
  source 1..39: mol_type = other DNA
cagagtgatggcaccgcgtcgacgagtgggtgggcacag

SEQ ID NO: 575 - DNA, 39 bp, synthetic construct
  misc_feature 1..39: note = Description of Artificial Sequence: Synthetic oligonucleotide
  source 1..39: mol_type = other DNA
cagagtgatggcaccgcgtcggtgacggggtgggcacag

SEQ ID NO: 576 - DNA, 39 bp, synthetic construct
  misc_feature 1..39: note = Description of Artificial Sequence: Synthetic oligonucleotide
  source 1..39: mol_type = other DNA
cagagtgatggcaccgcgagttattatgattctgcacag

SEQ ID NO: 577 - DNA, 39 bp, synthetic construct
  misc_feature 1..39: note = Description of Artificial Sequence: Synthetic oligonucleotide
  source 1..39: mol_type = other DNA
cagagtgatggcaccgcgacgacgatggggtgggcacag

SEQ ID NO: 578 - DNA, 39 bp, synthetic construct
  misc_feature 1..39: note = Description of Artificial Sequence: Synthetic oligonucleotide
  source 1..39: mol_type = other DNA
cagagtgatggcaccgcgacgacgacgggttgggcacag

SEQ ID NO: 579 - DNA, 39 bp, synthetic construct
  misc_feature 1..39: note = Description of Artificial Sequence: Synthetic oligonucleotide
  source 1..39: mol_type = other DNA
cagagtgatggcaccgcgtatcgtttgtcgtctgcacag

SEQ ID NO: 580 - DNA, 39 bp, synthetic construct
  misc_feature 1..39: note = Description of Artificial Sequence: Synthetic oligonucleotide
  source 1..39: mol_type = other DNA
cagagtgatggcaccgataagatgtggagtattgcacag

SEQ ID NO: 581 - DNA, 39 bp, synthetic construct
  misc_feature 1..39: note = Description of Artificial Sequence: Synthetic oligonucleotide
  source 1..39: mol_type = other DNA
cagagtgatggcaccggtggtattaaggggtgggcacag

SEQ ID NO: 582 - DNA, 39 bp, synthetic construct
  misc_feature 1..39: note = Description of Artificial Sequence: Synthetic oligonucleotide
  source 1..39: mol_type = other DNA
cagagtgatggcaccggggggattatgggttgggcacag

SEQ ID NO: 583 - DNA, 39 bp, synthetic construct
  misc_feature 1..39: note = Description of Artificial Sequence: Synthetic oligonucleotide
  source 1..39: mol_type = other DNA
cagagtgatggcaccggtgggatttcggggtgggcacag

SEQ ID NO: 584 - DNA, 39 bp, synthetic construct
  misc_feature 1..39: note = Description of Artificial Sequence: Synthetic oligonucleotide
  source 1..39: mol_type = other DNA
cagagtgatggcaccgggggtcttgctggttgggcacag

SEQ ID NO: 585 - DNA, 39 bp, synthetic construct
  misc_feature 1..39: note = Description of Artificial Sequence: Synthetic oligonucleotide
  source 1..39: mol_type = other DNA
cagagtgatggcaccggggggttgcatggttgggcacag

SEQ ID NO: 586 - DNA, 39 bp, synthetic construct
  misc_feature 1..39: note = Description of Artificial Sequence: Synthetic oligonucleotide
  source 1..39: mol_type = other DNA
cagagtgatggcaccgggggtttgcagggttgggcacag

SEQ ID NO: 587 - DNA, 39 bp, synthetic construct
  misc_feature 1..39: note = Description of Artificial Sequence: Synthetic oligonucleotide
  source 1..39: mol_type = other DNA
cagagtgatggcaccgggggtttgcgtggttgggcacag

SEQ ID NO: 588 - DNA, 39 bp, synthetic construct
  misc_feature 1..39: note = Description of Artificial Sequence: Synthetic oligonucleotide
  source 1..39: mol_type = other DNA
cagagtgatggcaccggtgggttgtcgggttgggcacag

SEQ ID NO: 589 - DNA, 39 bp, synthetic construct
  misc_feature 1..39: note = Description of Artificial Sequence: Synthetic oligonucleotide
  source 1..39: mol_type = other DNA
cagagtgatggcaccggggggttgacgggttgggcacag

SEQ ID NO: 590 - DNA, 39 bp, synthetic construct
  misc_feature 1..39: note = Description of Artificial Sequence: Synthetic oligonucleotide
  source 1..39: mol_type = other DNA
cagagtgatggcaccggtgggactaagggttgggcacag

SEQ ID NO: 591 - DNA, 39 bp, synthetic construct
  misc_feature 1..39: note = Description of Artificial Sequence: Synthetic oligonucleotide
  source 1..39: mol_type = other DNA
cagagtgatggcaccggggggacgagtggttgggcacag

SEQ ID NO: 592 - DNA, 39 bp, synthetic construct
  misc_feature 1..39: note = Description of Artificial Sequence: Synthetic oligonucleotide
  source 1..39: mol_type = other DNA
cagagtgatggcaccggtggggtgcatggttgggcacag

SEQ ID NO: 593 - DNA, 39 bp, synthetic construct
  misc_feature 1..39: note = Description of Artificial Sequence: Synthetic oligonucleotide
  source 1..39: mol_type = other DNA
cagagtgatggcaccggtggtgttatggggtgggcacag

SEQ ID NO: 594 - DNA, 39 bp, synthetic construct
  misc_feature 1..39: note = Description of Artificial Sequence: Synthetic oligonucleotide
  source 1..39: mol_type = other DNA
cagagtgatggcaccgggggggtgtctggttgggcacag

SEQ ID NO: 595 - DNA, 39 bp, synthetic construct
  misc_feature 1..39: note = Description of Artificial Sequence: Synthetic oligonucleotide
  source 1..39: mol_type = other DNA
cagagtgatggcaccggtggtgtgacggggtgggcacag

SEQ ID NO: 596 - DNA, 39 bp, synthetic construct
  misc_feature 1..39: note = Description of Artificial Sequence: Synthetic oligonucleotide
  source 1..39: mol_type = other DNA
cagagtgatggcaccggtggtgtgtatgggtgggcacag

SEQ ID NO: 597 - DNA, 39 bp, synthetic construct
  misc_feature 1..39: note = Description of Artificial Sequence: Synthetic oligonucleotide
  source 1..39: mol_type = other DNA
cagagtgatggcaccggtaatttgcagggttgggcacag

SEQ ID NO: 598 - DNA, 39 bp, synthetic construct
  misc_feature 1..39: note = Description of Artificial Sequence: Synthetic oligonucleotide
  source 1..39: mol_type = other DNA
cagagtgatggcaccgggaatcttagggggtgggcacag

SEQ ID NO: 599 - DNA, 39 bp, synthetic construct
  misc_feature 1..39: note = Description of Artificial Sequence: Synthetic oligonucleotide
  source 1..39: mol_type = other DNA
cagagtgatggcaccgggaatttgagtgggtgggcacag

SEQ ID NO: 600 - DNA, 39 bp, synthetic construct
  misc_feature 1..39: note = Description of Artificial Sequence: Synthetic oligonucleotide
  source 1..39: mol_type = other DNA
cagagtgatggcaccgggaatactcatgggtgggcacag

SEQ ID NO: 601 - DNA, 39 bp, synthetic construct
  misc_feature 1..39: note = Description of Artificial Sequence: Synthetic oligonucleotide
  source 1..39: mol_type = other DNA
cagagtgatggcaccgggaatactcgggggtgggcacag

SEQ ID NO: 602 - DNA, 39 bp, synthetic construct
  misc_feature 1..39: note = Description of Artificial Sequence: Synthetic oligonucleotide
  source 1..39: mol_type = other DNA
cagagtgatggcaccggtaatactagtggttgggcacag

SEQ ID NO: 603 - DNA, 39 bp, synthetic construct
  misc_feature 1..39: note = Description of Artificial Sequence: Synthetic oligonucleotide
  source 1..39: mol_type = other DNA
cagagtgatggcaccgggaatgtgtcggggtgggcacag

SEQ ID NO: 604 - DNA, 39 bp, synthetic construct
  misc_feature 1..39: note = Description of Artificial Sequence: Synthetic oligonucleotide
  source 1..39: mol_type = other DNA
cagagtgatggcaccggtaatgtgacggggtgggcacag

SEQ ID NO: 605 - DNA, 39 bp, synthetic construct
  misc_feature 1..39: note = Description of Artificial Sequence: Synthetic oligonucleotide
  source 1..39: mol_type = other DNA
cagagtgatggcaccgggcagcttgtgggttgggcacag

SEQ ID NO: 606 - DNA, 39 bp, synthetic construct
  misc_feature 1..39: note = Description of Artificial Sequence: Synthetic oligonucleotide
  source 1..39: mol_type = other DNA
cagagtgatggcaccggtcagacgattggttgggcacag

SEQ ID NO: 607 - DNA, 39 bp, synthetic construct
  misc_feature 1..39: note = Description of Artificial Sequence: Synthetic oligonucleotide
  source 1..39: mol_type = other DNA
cagagtgatggcaccgggcaggtgactgggtgggcacag

SEQ ID NO: 608 - DNA, 39 bp, synthetic construct
  misc_feature 1..39: note = Description of Artificial Sequence: Synthetic oligonucleotide
  source 1..39: mol_type = other DNA
cagagtgatggcaccggtcggttgacgggttgggcacag

SEQ ID NO: 609 - DNA, 39 bp, synthetic construct
  misc_feature 1..39: note = Description of Artificial Sequence: Synthetic oligonucleotide
  source 1..39: mol_type = other DNA
cagagtgatggcaccggtcggactgttgggtgggcacag

SEQ ID NO: 610 - DNA, 39 bp, synthetic construct
  misc_feature 1..39: note = Description of Artificial Sequence: Synthetic oligonucleotide
  source 1..39: mol_type = other DNA
cagagtgatggcaccggttcgggtatgatgacggcacag

SEQ ID NO: 611 - DNA, 39 bp, synthetic construct
  misc_feature 1..39: note = Description of Artificial Sequence: Synthetic oligonucleotide
  source 1..39: mol_type = other DNA
cagagtgatggcaccgggtcgattagtgggtgggcacag

SEQ ID NO: 612 - DNA, 39 bp, synthetic construct
  misc_feature 1..39: note = Description of Artificial Sequence: Synthetic oligonucleotide
  source 1..39: mol_type = other DNA
cagagtgatggcaccggttctttggcggggtgggcacag

SEQ ID NO: 613 - DNA, 39 bp, synthetic construct
  misc_feature 1..39: note = Description of Artificial Sequence: Synthetic oligonucleotide
  source 1..39: mol_type = other DNA
cagagtgatggcaccgggtctttgaatgggtgggcacag

SEQ ID NO: 614 - DNA, 39 bp, synthetic construct
  misc_feature 1..39: note = Description of Artificial Sequence: Synthetic oligonucleotide
  source 1..39: mol_type = other DNA
cagagtgatggcaccgggtcgctgcagggttgggcacag

SEQ ID NO: 615 - DNA, 39 bp, synthetic construct
  misc_feature 1..39: note = Description of Artificial Sequence: Synthetic oligonucleotide
  source 1..39: mol_type = other DNA
cagagtgatggcaccgggagtctgtcggggtgggcacag

SEQ ID NO: 616 - DNA, 39 bp, synthetic construct
  misc_feature 1..39: note = Description of Artificial Sequence: Synthetic oligonucleotide
  source 1..39: mol_type = other DNA
cagagtgatggcaccgggtcgttggtgggttgggcacag

SEQ ID NO: 617 - DNA, 39 bp, synthetic construct
  misc_feature 1..39: note = Description of Artificial Sequence: Synthetic oligonucleotide
  source 1..39: mol_type = other DNA
cagagtgatggcaccgggagtacgcatgggtgggcacag

SEQ ID NO: 618 - DNA, 39 bp, synthetic construct
  misc_feature 1..39: note = Description of Artificial Sequence: Synthetic oligonucleotide
  source 1..39: mol_type = other DNA
cagagtgatggcaccgggagtactaaggggtgggcacag

SEQ ID NO: 619 - DNA, 39 bp, synthetic construct
  misc_feature 1..39: note = Description of Artificial Sequence: Synthetic oligonucleotide
  source 1..39: mol_type = other DNA
cagagtgatggcaccggttctactatgggttgggcacag

SEQ ID NO: 620 - DNA, 39 bp, synthetic construct
  misc_feature 1..39: note = Description of Artificial Sequence: Synthetic oligonucleotide
  source 1..39: mol_type = other DNA
cagagtgatggcaccggtagtacgcagggttgggcacag

SEQ ID NO: 621 - DNA, 39 bp, synthetic construct
  misc_feature 1..39: note = Description of Artificial Sequence: Synthetic oligonucleotide
  source 1..39: mol_type = other DNA
cagagtgatggcaccgggagtacttcggggtgggcacag

SEQ ID NO: 622 - DNA, 39 bp, synthetic construct
  misc_feature 1..39: note = Description of Artificial Sequence: Synthetic oligonucleotide
  source 1..39: mol_type = other DNA
cagagtgatggcaccgggagtacgacggggtgggcacag

SEQ ID NO: 623 - DNA, 39 bp, synthetic construct
  misc_feature 1..39: note = Description of Artificial Sequence: Synthetic oligonucleotide
  source 1..39: mol_type = other DNA
cagagtgatggcaccggttcggttatggggtgggcacag

SEQ ID NO: 624 - DNA, 39 bp, synthetic construct
  misc_feature 1..39: note = Description of Artificial Sequence: Synthetic oligonucleotide
  source 1..39: mol_type = other DNA
cagagtgatggcaccgggtctgtgactgggtgggcacag

SEQ ID NO: 625 - DNA, 39 bp, synthetic construct
  misc_feature 1..39: note = Description of Artificial Sequence: Synthetic oligonucleotide
  source 1..39: mol_type = other DNA
cagagtgatggcaccgggacgcttgcggggtgggcacag

SEQ ID NO: 626 - DNA, 39 bp, synthetic construct
  misc_feature 1..39: note = Description of Artificial Sequence: Synthetic oligonucleotide
  source 1..39: mol_type = other DNA
cagagtgatggcaccggtactttgcatggttgggcacag

SEQ ID NO: 627 - DNA, 39 bp, synthetic construct
  misc_feature 1..39: note = Description of Artificial Sequence: Synthetic oligonucleotide
  source 1..39: mol_type = other DNA
cagagtgatggcaccggtactcttaagggttgggcacag

SEQ ID NO: 628 - DNA, 39 bp, synthetic construct
  misc_feature 1..39: note = Description of Artificial Sequence: Synthetic oligonucleotide
  source 1..39: mol_type = other DNA
cagagtgatggcaccgggactctgtcgggttgggcacag

SEQ ID NO: 629 - DNA, 39 bp, synthetic construct
  misc_feature 1..39: note = Description of Artificial Sequence: Synthetic oligonucleotide
  source 1..39: mol_type = other DNA
cagagtgatggcaccgggactacgctggggtgggcacag

SEQ ID NO: 630 - DNA, 39 bp, synthetic construct
  misc_feature 1..39: note = Description of Artificial Sequence: Synthetic oligonucleotide
  source 1..39: mol_type = other DNA
cagagtgatggcaccgggactactatgggttgggcacag

SEQ ID NO: 631 - DNA, 39 bp, synthetic construct
  misc_feature 1..39: note = Description of Artificial Sequence: Synthetic oligonucleotide
  source 1..39: mol_type = other DNA
cagagtgatggcaccgggactactacggggtgggcacag

SEQ ID NO: 632 - DNA, 39 bp, synthetic construct
  misc_feature 1..39: note = Description of Artificial Sequence: Synthetic oligonucleotide
  source 1..39: mol_type = other DNA
cagagtgatggcaccggtactacggtggggtgggcacag

SEQ ID NO: 633 - DNA, 39 bp, synthetic construct
  misc_feature 1..39: note = Description of Artificial Sequence: Synthetic oligonucleotide
  source 1..39: mol_type = other DNA
cagagtgatggcaccgggacgacgtatggttgggcacag

SEQ ID NO: 634 - DNA, 39 bp, synthetic construct
  misc_feature 1..39: note = Description of Artificial Sequence: Synthetic oligonucleotide
  source 1..39: mol_type = other DNA
cagagtgatggcaccggtacggttcatggttgggcacag

SEQ ID NO: 635 - DNA, 39 bp, synthetic construct
  misc_feature 1..39: note = Description of Artificial Sequence: Synthetic oligonucleotide
  source 1..39: mol_type = other DNA
cagagtgatggcaccgggactgtgcaggggtgggcacag

SEQ ID NO: 636 - DNA, 39 bp, synthetic construct
  misc_feature 1..39: note = Description of Artificial Sequence: Synthetic oligonucleotide
  source 1..39: mol_type = other DNA
cagagtgatggcaccggtactgtttctggttgggcacag

SEQ ID NO: 637 - DNA, 39 bp, synthetic construct
  misc_feature 1..39: note = Description of Artificial Sequence: Synthetic oligonucleotide
  source 1..39: mol_type = other DNA
cagagtgatggcaccggtactgttactgggtgggcacag

SEQ ID NO: 638 - DNA, 39 bp, synthetic construct
  misc_feature 1..39: note = Description of Artificial Sequence: Synthetic oligonucleotide
  source 1..39: mol_type = other DNA
cagagtgatggcacccatgcgaggttgtcttcggcacag

SEQ ID NO: 639 - DNA, 39 bp, synthetic construct
  misc_feature 1..39: note = Description of Artificial Sequence: Synthetic oligonucleotide
  source 1..39: mol_type = other DNA
cagagtgatggcacccatgcttatatggcgtctgcacag

SEQ ID NO: 640 - DNA, 39 bp, synthetic construct
  misc_feature 1..39: note = Description of Artificial Sequence: Synthetic oligonucleotide
  source 1..39: mol_type = other DNA
cagagtgatggcacccattttgcgccgccgcgtgcacag

SEQ ID NO: 641 - DNA, 39 bp, synthetic construct
  misc_feature 1..39: note = Description of Artificial Sequence: Synthetic oligonucleotide
  source 1..39: mol_type = other DNA
cagagtgatggcacccatattcatctgagtagtgcacag

SEQ ID NO: 642 - DNA, 39 bp, synthetic construct
  misc_feature 1..39: note = Description of Artificial Sequence: Synthetic oligonucleotide
  source 1..39: mol_type = other DNA
cagagtgatggcacccatattagggctctgagtgcacag

SEQ ID NO: 643 - DNA, 39 bp, synthetic construct
  misc_feature 1..39: note = Description of Artificial Sequence: Synthetic oligonucleotide
  source 1..39: mol_type = other DNA
cagagtgatggcacccatattcgtttggcgagtgcacag

SEQ ID NO: 644 - DNA, 39 bp, synthetic construct
  misc_feature 1..39: note = Description of Artificial Sequence: Synthetic oligonucleotide
  source 1..39: mol_type = other DNA
cagagtgatggcacccatctgcagccgtttagggcacag

SEQ ID NO: 645 - DNA, 39 bp, synthetic construct
  misc_feature 1..39: note = Description of Artificial Sequence: Synthetic oligonucleotide
  source 1..39: mol_type = other DNA
cagagtgatggcacccatagtttttatgatgcggcacag

SEQ ID NO: 646 - DNA, 39 bp, synthetic construct
  misc_feature 1..39: note = Description of Artificial Sequence: Synthetic oligonucleotide
  source 1..39: mol_type = other DNA
cagagtgatggcacccattctactacgggttgggcacag

SEQ ID NO: 647 - DNA, 39 bp, synthetic construct
  misc_feature 1..39: note = Description of Artificial Sequence: Synthetic oligonucleotide
  source 1..39: mol_type = other DNA
cagagtgatggcacccatacgcggacgggttgggcacag

SEQ ID NO: 648 - DNA, 39 bp, synthetic construct
  misc_feature 1..39: note = Description of Artificial Sequence: Synthetic oligonucleotide
  source 1..39: mol_type = other DNA
cagagtgatggcacccatgttagggcgttgtcggcacag

SEQ ID NO: 649 - DNA, 39 bp, synthetic construct
  misc_feature 1..39: note = Description of Artificial Sequence: Synthetic oligonucleotide
  source 1..39: mol_type = other DNA
cagagtgatggcacccatgtttatatggctagtgcacag

SEQ ID NO: 650 - DNA, 39 bp, synthetic construct
  misc_feature 1..39: note = Description of Artificial Sequence: Synthetic oligonucleotide
  source 1..39: mol_type = other DNA
cagagtgatggcacccatgtgtatatgtctagtgcacag

SEQ ID NO: 651 - DNA, 39 bp, synthetic construct
  misc_feature 1..39: note = Description of Artificial Sequence: Synthetic oligonucleotide
  source 1..39: mol_type = other DNA
cagagtgatggcaccattgcgcttccgtttaaggcacag

SEQ ID NO: 652 - DNA, 39 bp, synthetic construct
  misc_feature 1..39: note = Description of Artificial Sequence: Synthetic oligonucleotide
  source 1..39: mol_type = other DNA
cagagtgatggcaccattgctttgccgtttagggcacag

SEQ ID NO: 653 - DNA, 39 bp, synthetic construct
  misc_feature 1..39: note = Description of Artificial Sequence: Synthetic oligonucleotide
  source 1..39: mol_type = other DNA
cagagtgatggcaccattgcgacgcggtatgtggcacag

SEQ ID NO: 654 - DNA, 39 bp, synthetic construct
  misc_feature 1..39: note = Description of Artificial Sequence: Synthetic oligonucleotide
  source 1..39: mol_type = other DNA
cagagtgatggcaccattgagcggccttttcgtgcacag

SEQ ID NO: 655 - DNA, 39 bp, synthetic construct
  misc_feature 1..39: note = Description of Artificial Sequence: Synthetic oligonucleotide
  source 1..39: mol_type = other DNA
cagagtgatggcaccattggttatgcgtatgttgcacag

SEQ ID NO: 656 - DNA, 39 bp, synthetic construct
  misc_feature 1..39: note = Description of Artificial Sequence: Synthetic oligonucleotide
  source 1..39: mol_type = other DNA
cagagtgatggcaccattcaggctccgtttaaggcacag

SEQ ID NO: 657 - DNA, 39 bp, synthetic construct
  misc_feature 1..39: note = Description of Artificial Sequence: Synthetic oligonucleotide
  source 1..39: mol_type = other DNA
cagagtgatggcaccattcgtcttccttttaaggcacag

SEQ ID NO: 658 - DNA, 39 bp, synthetic construct
  misc_feature 1..39: note = Description of Artificial Sequence: Synthetic oligonucleotide
  source 1..39: mol_type = other DNA
cagagtgatggcaccatttctaaggaggtgggggcacag

SEQ ID NO: 659 - DNA, 39 bp, synthetic construct
  misc_feature 1..39: note = Description of Artificial Sequence: Synthetic oligonucleotide
  source 1..39: mol_type = other DNA
cagagtgatggcaccatttcgcagccttttaaggcacag

SEQ ID NO: 660 - DNA, 39 bp, synthetic construct
  misc_feature 1..39: note = Description of Artificial Sequence: Synthetic oligonucleotide
  source 1..39: mol_type = other DNA
cagagtgatggcaccaagattcagctgtctagtgcacag

SEQ ID NO: 661 - DNA, 39 bp, synthetic construct
  misc_feature 1..39: note = Description of Artificial Sequence: Synthetic oligonucleotide
  source 1..39: mol_type = other DNA
cagagtgatggcaccaagattcggttgtcgtctgcacag

SEQ ID NO: 662 - DNA, 39 bp, synthetic construct
  misc_feature 1..39: note = Description of Artificial Sequence: Synthetic oligonucleotide
  source 1..39: mol_type = other DNA
cagagtgatggcaccaagctgatgttgagtagtgcacag

SEQ ID NO: 663 - DNA, 39 bp, synthetic construct
  misc_feature 1..39: note = Description of Artificial Sequence: Synthetic oligonucleotide
  source 1..39: mol_type = other DNA
cagagtgatggcaccaagttgaggcttagttctgcacag

SEQ ID NO: 664 - DNA, 39 bp, synthetic construct
  misc_feature 1..39: note = Description of Artificial Sequence: Synthetic oligonucleotide
  source 1..39: mol_type = other DNA
cagagtgatggcaccaagatggtgttgcagctggcacag

SEQ ID NO: 665 - DNA, 39 bp, synthetic construct
  misc_feature 1..39: note = Description of Artificial Sequence: Synthetic oligonucleotide
  source 1..39: mol_type = other DNA
cagagtgatggcaccaagagtcttgtgcagcttgcacag

SEQ ID NO: 666 - DNA, 39 bp, synthetic construct
  misc_feature 1..39: note = Description of Artificial Sequence: Synthetic oligonucleotide
  source 1..39: mol_type = other DNA
cagagtgatggcaccaaggtgctggtgcagttggcacag

SEQ ID NO: 667 - DNA, 39 bp, synthetic construct
  misc_feature 1..39: note = Description of Artificial Sequence: Synthetic oligonucleotide
  source 1..39: mol_type = other DNA
cagagtgatggcaccttggctgctccttttaaggcacag

SEQ ID NO: 668 - DNA, 39 bp, synthetic construct
  misc_feature 1..39: note = Description of Artificial Sequence: Synthetic oligonucleotide
  source 1..39: mol_type = other DNA
cagagtgatgggactttggcggtgaattttaaggcacag

SEQ ID NO: 669 - DNA, 39 bp, synthetic construct
  misc_feature 1..39: note = Description of Artificial Sequence: Synthetic oligonucleotide
  source 1..39: mol_type = other DNA
cagagtgatgggactttggcggtgccttttaaggcacag

SEQ ID NO: 670 - DNA, 39 bp, synthetic construct
  misc_feature 1..39: note = Description of Artificial Sequence: Synthetic oligonucleotide
  source 1..39: mol_type = other DNA
cagagtgatggcacccttgcgtatccttttaaggcacag

SEQ ID NO: 671 - DNA, 39 bp, synthetic construct
  misc_feature 1..39: note = Description of Artificial Sequence: Synthetic oligonucleotide
  source 1..39: mol_type = other DNA
cagagtgatggcaccctggagaggccgtttcgggcacag

SEQ ID NO: 672 - DNA, 39 bp, synthetic construct
  misc_feature 1..39: note = Description of Artificial Sequence: Synthetic oligonucleotide
  source 1..39: mol_type = other DNA
cagagtgatgggactttggaggtgcattttaaggcacag

SEQ ID NO: 673 - DNA, 39 bp, synthetic construct
  misc_feature 1..39: note = Description of Artificial Sequence: Synthetic oligonucleotide
  source 1..39: mol_type = other DNA
cagagtgatggcaccttgctgaggctgagtagtgcacag

SEQ ID NO: 674 - DNA, 39 bp, synthetic construct
  misc_feature 1..39: note = Description of Artificial Sequence: Synthetic oligonucleotide
  source 1..39: mol_type = other DNA
cagagtgatggcaccttgaataatccgtttagggcacag

SEQ ID NO: 675 - DNA, 39 bp, synthetic construct
  misc_feature 1..39: note = Description of Artificial Sequence: Synthetic oligonucleotide
  source 1..39: mol_type = other DNA
cagagtgatggcaccttgcagcagccgtttcgggcacag

SEQ ID NO: 676 - DNA, 39 bp, synthetic construct
  misc_feature 1..39: note = Description of Artificial Sequence: Synthetic oligonucleotide
  source 1..39: mol_type = other DNA
cagagtgatggcaccctgtctcagccttttagggcacag

SEQ ID NO: 677 - DNA, 39 bp, synthetic construct
  misc_feature 1..39: note = Description of Artificial Sequence: Synthetic oligonucleotide
  source 1..39: mol_type = other DNA
cagagtgatggcaccttgtcgcgtacgctttgggcacag

SEQ ID NO: 678 - DNA, 39 bp, synthetic construct
  misc_feature 1..39: note = Description of Artificial Sequence: Synthetic oligonucleotide
  source 1..39: mol_type = other DNA
cagagtgatggcaccctgtctagtccgtttagggcacag

SEQ ID NO: 679 - DNA, 39 bp, synthetic construct
  misc_feature 1..39: note = Description of Artificial Sequence: Synthetic oligonucleotide
  source 1..39: mol_type = other DNA
cagagtgatggcaccttgacggttccttttcgggcacag

SEQ ID NO: 680 - DNA, 39 bp, synthetic construct
  misc_feature 1..39: note = Description of Artificial Sequence: Synthetic oligonucleotide
  source 1..39: mol_type = other DNA
cagagtgatggcacccttgttgcgccgtttagggcacag

SEQ ID NO: 681 - DNA, 39 bp, synthetic construct
  misc_feature 1..39: note = Description of Artificial Sequence: Synthetic oligonucleotide
  source 1..39: mol_type = other DNA
cagagtgatggcacgatggataagccttttagggcacag

SEQ ID NO: 682 - DNA, 39 bp, synthetic construct
  misc_feature 1..39: note = Description of Artificial Sequence: Synthetic oligonucleotide
  source 1..39: mol_type = other DNA
cagagtgatggcaccatggataggccgtttaaggcacag

SEQ ID NO: 683 - DNA, 39 bp, synthetic construct
  misc_feature 1..39: note = Description of Artificial Sequence: Synthetic oligonucleotide
  source 1..39: mol_type = other DNA
cagagtgatggcaccatgttgcgtcttagttcggcacag

SEQ ID NO: 684 - DNA, 39 bp, synthetic construct
  misc_feature 1..39: note = Description of Artificial Sequence: Synthetic oligonucleotide
  source 1..39: mol_type = other DNA
cagagtgatggcaccatgcagcttacggggtgggcacag

SEQ ID NO: 685 - DNA, 39 bp, synthetic construct
  misc_feature 1..39: note = Description of Artificial Sequence: Synthetic oligonucleotide
  source 1..39: mol_type = other DNA
cagagtgatggcaccaatggtctgaaggggtgggcacag

SEQ ID NO: 686 - DNA, 39 bp, synthetic construct
  misc_feature 1..39: note = Description of Artificial Sequence: Synthetic oligonucleotide
  source 1..39: mol_type = other DNA
cagagtgatggcaccaatagtattagtgggtgggcacag

SEQ ID NO: 687 - DNA, 39 bp, synthetic construct
  misc_feature 1..39: note = Description of Artificial Sequence: Synthetic oligonucleotide
  source 1..39: mol_type = other DNA
cagagtgatggcaccaattctctgtcgggttgggcacag

SEQ ID NO: 688 - DNA, 39 bp, synthetic construct
  misc_feature 1..39: note = Description of Artificial Sequence: Synthetic oligonucleotide
  source 1..39: mol_type = other DNA
cagagtgatggcaccaattctacgacgggttgggcacag

SEQ ID NO: 689 - DNA, 39 bp, synthetic construct
  misc_feature 1..39: note = Description of Artificial Sequence: Synthetic oligonucleotide
  source 1..39: mol_type = other DNA
cagagtgatggcaccaatagtgttacgggttgggcacag

SEQ ID NO: 690 - DNA, 39 bp, synthetic construct
  misc_feature 1..39: note = Description of Artificial Sequence: Synthetic oligonucleotide
  source 1..39: mol_type = other DNA
cagagtgatggcaccaatactattaatgggtgggcacag

SEQ ID NO: 691 - DNA, 39 bp, synthetic construct
  misc_feature 1..39: note = Description of Artificial Sequence: Synthetic oligonucleotide
  source 1..39: mol_type = other DNA
cagagtgatggcaccaatacgttgggggggtgggcacag

SEQ ID NO: 692 - DNA, 39 bp, synthetic construct
  misc_feature 1..39: note = Description of Artificial Sequence: Synthetic oligonucleotide
  source 1..39: mol_type = other DNA
cagagtgatggcaccaatactactcatgggtgggcacag

SEQ ID NO: 693 - DNA, 39 bp, synthetic construct
  misc_feature 1..39: note = Description of Artificial Sequence: Synthetic oligonucleotide
  source 1..39: mol_type = other DNA
cagagtgatggcaccaattataggctgtcgagtgcacag

SEQ ID NO: 694 - DNA, 39 bp, synthetic construct
  misc_feature 1..39: note = Description of Artificial Sequence: Synthetic oligonucleotide
  source 1..39: mol_type = other DNA
cagagtgatggcacccaggcgctgtcggggtgggcacag

SEQ ID NO: 695 - DNA, 39 bp, synthetic construct
  misc_feature 1..39: note = Description of Artificial Sequence: Synthetic oligonucleotide
  source 1..39: mol_type = other DNA
cagagtgatggcacccagtttaggttgtcttcggcacag

SEQ ID NO: 696 - DNA, 39 bp, synthetic construct
  misc_feature 1..39: note = Description of Artificial Sequence: Synthetic oligonucleotide
  source 1..39: mol_type = other DNA
cagagtgatggcacccagtttagtcctccgcgtgcacag

SEQ ID NO: 697 - DNA, 39 bp, synthetic construct
  misc_feature 1..39: note = Description of Artificial Sequence: Synthetic oligonucleotide
  source 1..39: mol_type = other DNA
cagagtgatggcacccaggggctgaaggggtgggcacag

SEQ ID NO: 698 - DNA, 39 bp, synthetic construct
  misc_feature 1..39: note = Description of Artificial Sequence: Synthetic oligonucleotide
  source 1..39: mol_type = other DNA
cagagtgatggcacccagactacgagtgggtgggcacag

SEQ ID NO: 699 - DNA, 39 bp, synthetic construct
  misc_feature 1..39: note = Description of Artificial Sequence: Synthetic oligonucleotide
  source 1..39: mol_type = other DNA
cagagtgatggcaccagggctcttacgggttgggcacag

SEQ ID NO: 700 - DNA, 39 bp, synthetic construct
  misc_feature 1..39: note = Description of Artificial Sequence: Synthetic oligonucleotide
  source 1..39: mol_type = other DNA
cagagtgatggcacccggttttcgctttcgagtgcacag

SEQ ID NO: 701 - DNA, 39 bp, synthetic construct
  misc_feature 1..39: note = Description of Artificial Sequence: Synthetic oligonucleotide
  source 1..39: mol_type = other DNA
cagagtgatggcaccagggggttgtcggggtgggcacag

SEQ ID NO: 702 - DNA, 39 bp, synthetic construct
  misc_feature 1..39: note = Description of Artificial Sequence: Synthetic oligonucleotide
  source 1..39: mol_type = other DNA
cagagtgatggcaccaggattgggctgagtagtgcacag

SEQ ID NO: 703 - DNA, 39 bp, synthetic construct
  misc_feature 1..39: note = Description of Artificial Sequence: Synthetic oligonucleotide
  source 1..39: mol_type = other DNA
cagagtgatggcaccaggcttcatctggcgagtgcacag

SEQ ID NO: 704 - DNA, 39 bp, synthetic construct
  misc_feature 1..39: note = Description of Artificial Sequence: Synthetic oligonucleotide
  source 1..39: mol_type = other DNA
cagagtgatggcaccaggcttcatctgtcgtcggcacag

SEQ ID NO: 705 - DNA, 39 bp, synthetic construct
  misc_feature 1..39: note = Description of Artificial Sequence: Synthetic oligonucleotide
  source 1..39: mol_type = other DNA
cagagtgatggcacccgtttgctgctgtcgagtgcacag

SEQ ID NO: 706 - DNA, 39 bp, synthetic construct
  misc_feature 1..39: note = Description of Artificial Sequence: Synthetic oligonucleotide
  source 1..39: mol_type = other DNA
cagagtgatggcacccgtttgatgctttctagtgcacag

SEQ ID NO: 707 - DNA, 39 bp, synthetic construct
  misc_feature 1..39: note = Description of Artificial Sequence: Synthetic oligonucleotide
  source 1..39: mol_type = other DNA
cagagtgatggcacccgtttgaatcttagttcggcacag

SEQ ID NO: 708 - DNA, 39 bp, synthetic construct
  misc_feature 1..39: note = Description of Artificial Sequence: Synthetic oligonucleotide
  source 1..39: mol_type = other DNA
cagagtgatggcacccggatggttgttcagcttgcacag

SEQ ID NO: 709 - DNA, 39 bp, synthetic construct
  misc_feature 1..39: note = Description of Artificial Sequence: Synthetic oligonucleotide
  source 1..39: mol_type = other DNA
cagagtgatggcacccgtaatatgtatgagggggcacag

SEQ ID NO: 710 - DNA, 39 bp, synthetic construct
  misc_feature 1..39: note = Description of Artificial Sequence: Synthetic oligonucleotide
  source 1..39: mol_type = other DNA
cagagtgatggcaccaggagtattacggggtgggcacag

SEQ ID NO: 711 - DNA, 39 bp, synthetic construct
  misc_feature 1..39: note = Description of Artificial Sequence: Synthetic oligonucleotide
  source 1..39: mol_type = other DNA
cagagtgatggcaccaggagtttgcatgggtgggcacag

SEQ ID NO: 712 - DNA, 39 bp, synthetic construct
  misc_feature 1..39: note = Description of Artificial Sequence: Synthetic oligonucleotide
  source 1..39: mol_type = other DNA
cagagtgatggcacccggagtactacgggttgggcacag

SEQ ID NO: 713 - DNA, 39 bp, synthetic construct
  misc_feature 1..39: note = Description of Artificial Sequence: Synthetic oligonucleotide
  source 1..39: mol_type = other DNA
cagagtgatggcacccgtactacgacgggttgggcacag

SEQ ID NO: 714 - DNA, 39 bp, synthetic construct
  misc_feature 1..39: note = Description of Artificial Sequence: Synthetic oligonucleotide
  source 1..39: mol_type = other DNA
cagagtgatggcacccggacggtgactggttgggcacag

SEQ ID NO: 715 - DNA, 39 bp, synthetic construct
  misc_feature 1..39: note = Description of Artificial Sequence: Synthetic oligonucleotide
  source 1..39: mol_type = other DNA
cagagtgatggcacccgtactgtggtgcagttggcacag

SEQ ID NO: 716 - DNA, 39 bp, synthetic construct
  misc_feature 1..39: note = Description of Artificial Sequence: Synthetic oligonucleotide
  source 1..39: mol_type = other DNA
cagagtgatggcacccgggtgcatctttctagtgcacag

SEQ ID NO: 717 - DNA, 39 bp, synthetic construct
  misc_feature 1..39: note = Description of Artificial Sequence: Synthetic oligonucleotide
  source 1..39: mol_type = other DNA
cagagtgatggcacctcgtttccgtatgctcgggcacag

SEQ ID NO: 718 - DNA, 39 bp, synthetic construct
  misc_feature 1..39: note = Description of Artificial Sequence: Synthetic oligonucleotide
  source 1..39: mol_type = other DNA
cagagtgatggcacctcgtttacgccgcctaaggcacag

SEQ ID NO: 719 - DNA, 39 bp, synthetic construct
  misc_feature 1..39: note = Description of Artificial Sequence: Synthetic oligonucleotide
  source 1..39: mol_type = other DNA
cagagtgatggcacctcgtttactccgccgcgggcacag

SEQ ID NO: 720 - DNA, 39 bp, synthetic construct
  misc_feature 1..39: note = Description of Artificial Sequence: Synthetic oligonucleotide
  source 1..39: mol_type = other DNA
cagagtgatggcacctctgggttgcatgggtgggcacag

SEQ ID NO: 721 - DNA, 39 bp, synthetic construct
  misc_feature 1..39: note = Description of Artificial Sequence: Synthetic oligonucleotide
  source 1..39: mol_type = other DNA
cagagtgatggcaccagtgggcttaaggggtgggcacag

SEQ ID NO: 722 - DNA, 39 bp, synthetic construct
  misc_feature 1..39: note = Description of Artificial Sequence: Synthetic oligonucleotide
  source 1..39: mol_type = other DNA
cagagtgatggcacctcgattcatttgagtagtgcacag

SEQ ID NO: 723 - DNA, 39 bp, synthetic construct
  misc_feature 1..39: note = Description of Artificial Sequence: Synthetic oligonucleotide
  source 1..39: mol_type = other DNA
cagagtgatggcacctcgattatgttgagttctgcacag

SEQ ID NO: 724 - DNA, 39 bp, synthetic construct
  misc_feature 1..39: note = Description of Artificial Sequence: Synthetic oligonucleotide
  source 1..39: mol_type = other DNA
cagagtgatggcacctctttgcggctttcttctgcacag

SEQ ID NO: 725 - DNA, 39 bp, synthetic construct
  misc_feature 1..39: note = Description of Artificial Sequence: Synthetic oligonucleotide
  source 1..39: mol_type = other DNA
cagagtgatggcacctctaattatggggcgcgggcacag

SEQ ID NO: 726 - DNA, 39 bp, synthetic construct
  misc_feature 1..39: note = Description of Artificial Sequence: Synthetic oligonucleotide
  source 1..39: mol_type = other DNA
cagagtgatggcaccagttcgtattatgatgcggcacag

SEQ ID NO: 727 - DNA, 39 bp, synthetic construct
  misc_feature 1..39: note = Description of Artificial Sequence: Synthetic oligonucleotide
  source 1..39: mol_type = other DNA
cagagtgatggcacctcgagttattatgattctgcacag

SEQ ID NO: 728 - DNA, 39 bp, synthetic construct
  misc_feature 1..39: note = Description of Artificial Sequence: Synthetic oligonucleotide
  source 1..39: mol_type = other DNA
cagagtgatggcacctctacgatttctggttgggcacag

SEQ ID NO: 729 - DNA, 39 bp, synthetic construct
  misc_feature 1..39: note = Description of Artificial Sequence: Synthetic oligonucleotide
  source 1..39: mol_type = other DNA
cagagtgatggcaccagtactattacgggttgggcacag

SEQ ID NO: 730 - DNA, 39 bp, synthetic construct
  misc_feature 1..39: note = Description of Artificial Sequence: Synthetic oligonucleotide
  source 1..39: mol_type = other DNA
cagagtgatggcacctcgacgttgcatgggtgggcacag

SEQ ID NO: 731 - DNA, 39 bp, synthetic construct
  misc_feature 1..39: note = Description of Artificial Sequence: Synthetic oligonucleotide
  source 1..39: mol_type = other DNA
cagagtgatggcacctctactctgcgtgggtgggcacag

SEQ ID NO: 732 - DNA, 39 bp, synthetic construct
  misc_feature 1..39: note = Description of Artificial Sequence: Synthetic oligonucleotide
  source 1..39: mol_type = other DNA
cagagtgatggcacctcgacgctgtcggggtgggcacag

SEQ ID NO: 733 - DNA, 39 bp, synthetic construct
  misc_feature 1..39: note = Description of Artificial Sequence: Synthetic oligonucleotide
  source 1..39: mol_type = other DNA
cagagtgatggcacctcttatgtgccgccgaaggcacag

SEQ ID NO: 734 - DNA, 39 bp, synthetic construct
  misc_feature 1..39: note = Description of Artificial Sequence: Synthetic oligonucleotide
  source 1..39: mol_type = other DNA
cagagtgatggcaccagttatgtgccgcctcgggcacag

SEQ ID NO: 735 - DNA, 39 bp, synthetic construct
  misc_feature 1..39: note = Description of Artificial Sequence: Synthetic oligonucleotide
  source 1..39: mol_type = other DNA
cagagtgatggcaccacggcgacttattataaggcacag

SEQ ID NO: 736 - DNA, 39 bp, synthetic construct
  misc_feature 1..39: note = Description of Artificial Sequence: Synthetic oligonucleotide
  source 1..39: mol_type = other DNA
cagagtgatggcaccacttttactcctcctcgggcacag

SEQ ID NO: 737 - DNA, 39 bp, synthetic construct
  misc_feature 1..39: note = Description of Artificial Sequence: Synthetic oligonucleotide
  source 1..39: mol_type = other DNA
cagagtgatggcaccactctggctccttttagggcacag

SEQ ID NO: 738 - DNA, 39 bp, synthetic construct
  misc_feature 1..39: note = Description of Artificial Sequence: Synthetic oligonucleotide
  source 1..39: mol_type = other DNA
cagagtgatggcaccactttggttccgccgcgtgcacag

SEQ ID NO: 739 - DNA, 39 bp, synthetic construct
  misc_feature 1..39: note = Description of Artificial Sequence: Synthetic oligonucleotide
  source 1..39: mol_type = other DNA
cagagtgatggcaccacgagtaagacgctttgggcacag

SEQ ID NO: 740 - DNA, 39 bp, synthetic construct
  misc_feature 1..39: note = Description of Artificial Sequence: Synthetic oligonucleotide
  source 1..39: mol_type = other DNA
cagagtgatggcaccacttctaggactttgtgggcacag

SEQ ID NO: 741 - DNA, 39 bp, synthetic construct
  misc_feature 1..39: note = Description of Artificial Sequence: Synthetic oligonucleotide
  source 1..39: mol_type = other DNA
cagagtgatggcaccacgactcgtagtttgtatgcacag

SEQ ID NO: 742 - DNA, 39 bp, synthetic construct
  misc_feature 1..39: note = Description of Artificial Sequence: Synthetic oligonucleotide
  source 1..39: mol_type = other DNA
cagagtgatggcaccactacgactacgggttgggcacag

SEQ ID NO: 743 - DNA, 39 bp, synthetic construct
  misc_feature 1..39: note = Description of Artificial Sequence: Synthetic oligonucleotide
  source 1..39: mol_type = other DNA
cagagtgatggcaccactacgtatggggctcgtgcacag

SEQ ID NO: 744 - DNA, 39 bp, synthetic construct
  misc_feature 1..39: note = Description of Artificial Sequence: Synthetic oligonucleotide
  source 1..39: mol_type = other DNA
cagagtgatggcaccacttggacgccgccgcgtgcacag

SEQ ID NO: 745 - DNA, 39 bp, synthetic construct
  misc_feature 1..39: note = Description of Artificial Sequence: Synthetic oligonucleotide
  source 1..39: mol_type = other DNA
cagagtgatggcaccacgtatatgcttagtagtgcacag

SEQ ID NO: 746 - DNA, 39 bp, synthetic construct
  misc_feature 1..39: note = Description of Artificial Sequence: Synthetic oligonucleotide
  source 1..39: mol_type = other DNA
cagagtgatggcaccacgtatgttcctccgcgggcacag

SEQ ID NO: 747 - DNA, 39 bp, synthetic construct
  misc_feature 1..39: note = Description of Artificial Sequence: Synthetic oligonucleotide
  source 1..39: mol_type = other DNA
cagagtgatggcaccgtggcgaatccttttcgggcacag

SEQ ID NO: 748 - DNA, 39 bp, synthetic construct
  misc_feature 1..39: note = Description of Artificial Sequence: Synthetic oligonucleotide
  source 1..39: mol_type = other DNA
cagagtgatggcaccgtggatcggccttttaaggcacag

SEQ ID NO: 749 - DNA, 39 bp, synthetic construct
  misc_feature 1..39: note = Description of Artificial Sequence: Synthetic oligonucleotide
  source 1..39: mol_type = other DNA
cagagtgatggcaccgttattcatctgagtagtgcacag

SEQ ID NO: 750 - DNA, 39 bp, synthetic construct
  misc_feature 1..39: note = Description of Artificial Sequence: Synthetic oligonucleotide
  source 1..39: mol_type = other DNA
cagagtgatggcaccgttattctgttgtcgagtgcacag

SEQ ID NO: 751 - DNA, 39 bp, synthetic construct
  misc_feature 1..39: note = Description of Artificial Sequence: Synthetic oligonucleotide
  source 1..39: mol_type = other DNA
cagagtgatggcaccgtgattatgctgtcgagtgcacag

SEQ ID NO: 752 - DNA, 39 bp, synthetic construct
  misc_feature 1..39: note = Description of Artificial Sequence: Synthetic oligonucleotide
  source 1..39: mol_type = other DNA
cagagtgatggcaccgtgcttcatttgtcgtctgcacag

SEQ ID NO: 753 - DNA, 39 bp, synthetic construct
  misc_feature 1..39: note = Description of Artificial Sequence: Synthetic oligonucleotide
  source 1..39: mol_type = other DNA
cagagtgatggcaccgttttgatgctgagtagtgcacag

SEQ ID NO: 754 - DNA, 39 bp, synthetic construct
  misc_feature 1..39: note = Description of Artificial Sequence: Synthetic oligonucleotide
  source 1..39: mol_type = other DNA
cagagtgatggcaccgtgttggtgccgtttagggcacag

SEQ ID NO: 755 - DNA, 39 bp, synthetic construct
  misc_feature 1..39: note = Description of Artificial Sequence: Synthetic oligonucleotide
  source 1..39: mol_type = other DNA
cagagtgatggcaccgttccgtatcttgcttctgcacag

SEQ ID NO: 756 - DNA, 39 bp, synthetic construct
  misc_feature 1..39: note = Description of Artificial Sequence: Synthetic oligonucleotide
  source 1..39: mol_type = other DNA
cagagtgatggcaccgtgccgtatttgtcttcggcacag

SEQ ID NO: 757 - DNA, 39 bp, synthetic construct
  misc_feature 1..39: note = Description of Artificial Sequence: Synthetic oligonucleotide
  source 1..39: mol_type = other DNA
cagagtgatggcaccgttcgtgtgccgtttagggcacag

SEQ ID NO: 758 - DNA, 39 bp, synthetic construct
  misc_feature 1..39: note = Description of Artificial Sequence: Synthetic oligonucleotide
  source 1..39: mol_type = other DNA
cagagtgatggcaccgtgtcgatgccgtttaaggcacag

SEQ ID NO: 759 - DNA, 39 bp, synthetic construct
  misc_feature 1..39: note = Description of Artificial Sequence: Synthetic oligonucleotide
  source 1..39: mol_type = other DNA
cagagtgatggcaccgtgtctaatccgtttagggcacag

SEQ ID NO: 760 - DNA, 39 bp, synthetic construct
  misc_feature 1..39: note = Description of Artificial Sequence: Synthetic oligonucleotide
  source 1..39: mol_type = other DNA
cagagtgatggcaccgtttctacgcgttgggtggcacag

SEQ ID NO: 761 - DNA, 39 bp, synthetic construct
  misc_feature 1..39: note = Description of Artificial Sequence: Synthetic oligonucleotide
  source 1..39: mol_type = other DNA
cagagtgatggcaccgtgacgacgactgggtgggcacag

SEQ ID NO: 762 - DNA, 39 bp, synthetic construct
  misc_feature 1..39: note = Description of Artificial Sequence: Synthetic oligonucleotide
  source 1..39: mol_type = other DNA
cagagtgatggcaccgtgacggttacggggtgggcacag

SEQ ID NO: 763 - DNA, 39 bp, synthetic construct
  misc_feature 1..39: note = Description of Artificial Sequence: Synthetic oligonucleotide
  source 1..39: mol_type = other DNA
cagagtgatggcaccgtttgggtgcctcctagggcacag

SEQ ID NO: 764 - DNA, 39 bp, synthetic construct
  misc_feature 1..39: note = Description of Artificial Sequence: Synthetic oligonucleotide
  source 1..39: mol_type = other DNA
cagagtgatggcaccgtttataggttgtcgagtgcacag

SEQ ID NO: 765 - DNA, 39 bp, synthetic construct
  misc_feature 1..39: note = Description of Artificial Sequence: Synthetic oligonucleotide
  source 1..39: mol_type = other DNA
cagagtgatggcacctatgcgcgtttgtcttctgcacag

SEQ ID NO: 766 - DNA, 39 bp, synthetic construct
  misc_feature 1..39: note = Description of Artificial Sequence: Synthetic oligonucleotide
  source 1..39: mol_type = other DNA
cagagtgatggcacctatggtaataagttgtgggcacag

SEQ ID NO: 767 - DNA, 39 bp, synthetic construct
  misc_feature 1..39: note = Description of Artificial Sequence: Synthetic oligonucleotide
  source 1..39: mol_type = other DNA
cagagtgatggcacctatattcatctgtcttcggcacag

SEQ ID NO: 768 - DNA, 39 bp, synthetic construct
  misc_feature 1..39: note = Description of Artificial Sequence: Synthetic oligonucleotide
  source 1..39: mol_type = other DNA
cagagtgatggcacctattcgacgagtgggtgggcacag

SEQ ID NO: 769 - DNA, 39 bp, synthetic construct
  misc_feature 1..39: note = Description of Artificial Sequence: Synthetic oligonucleotide
  source 1..39: mol_type = other DNA
cagagtgatggcgtgcatcctgggctttcgagtgcacag

SEQ ID NO: 770 - DNA, 39 bp, synthetic construct
  misc_feature 1..39: note = Description of Artificial Sequence: Synthetic oligonucleotide
  source 1..39: mol_type = other DNA
cagagtgatggcgtggttgcgttgcttgctagtgcacag

SEQ ID NO: 771 - DNA, 39 bp, synthetic construct
  misc_feature 1..39: note = Description of Artificial Sequence: Synthetic oligonucleotide
  source 1..39: mol_type = other DNA
cagagtgatggctatgtgggtgttggtagtttggcacag

SEQ ID NO: 772 - DNA, 18 bp, synthetic construct
  misc_feature 1..18: note = Description of Artificial Sequence: Synthetic oligonucleotide
  source 1..18: mol_type = other DNA
cagagtgcccaagcacag

SEQ ID NO: 773 - DNA, 39 bp, synthetic construct
  misc_feature 1..39: note = Description of Artificial Sequence: Synthetic oligonucleotide
  source 1..39: mol_type = other DNA
cagagtgcacaagcaggagcaggaagcgaaagagcacag

SEQ ID NO: 774 - DNA, 39 bp, synthetic construct
  misc_feature 1..39: note = Description of Artificial Sequence: Synthetic oligonucleotide
  source 1..39: mol_type = other DNA
cagagtgcacaagaccaaaacccaggaagatgggcacag

SEQ ID NO: 775 - DNA, 39 bp, synthetic construct
  misc_feature 1..39: note = Description of Artificial Sequence: Synthetic oligonucleotide
  source 1..39: mol_type = other DNA
cagagtgcacaagaactcacaagaccattcctcgcacag

SEQ ID NO: 776 - DNA, 39 bp, synthetic construct
  misc_feature 1..39: note = Description of Artificial Sequence: Synthetic oligonucleotide
  source 1..39: mol_type = other DNA
cagagtgcacaagaagtcccaggatacagatgggcacag

SEQ ID NO: 777 - DNA, 39 bp, synthetic construct
  misc_feature 1..39: note = Description of Artificial Sequence: Synthetic oligonucleotide
  source 1..39: mol_type = other DNA
cagagtgcacaattcccaacaaactacgacagcgcacag

SEQ ID NO: 778 - DNA, 39 bp, synthetic construct
  misc_feature 1..39: note = Description of Artificial Sequence: Synthetic oligonucleotide
  source 1..39: mol_type = other DNA
cagagtgcacaattcgtcgtcggacaacaatacgcacag

SEQ ID NO: 779 - DNA, 39 bp, synthetic construct
  misc_feature 1..39: note = Description of Artificial Sequence: Synthetic oligonucleotide
  source 1..39: mol_type = other DNA
cagagtgcacaaggagcaagcccaggaagatgggcacag

SEQ ID NO: 780 - DNA, 39 bp, synthetic construct
  misc_feature 1..39: note = Description of Artificial Sequence: Synthetic oligonucleotide
  source 1..39: mol_type = other DNA
cagagtgcacaaggagaaaacccaggaagatgggcacag

SEQ ID NO: 781 - DNA, 39 bp, synthetic construct
  misc_feature 1..39: note = Description of Artificial Sequence: Synthetic oligonucleotide
  source 1..39: mol_type = other DNA
cagagtgcacaaggaggaaacccaggaagatgggcacag

SEQ ID NO: 782 - DNA, 39 bp, synthetic construct
  misc_feature 1..39: note = Description of Artificial Sequence: Synthetic oligonucleotide
  source 1..39: mol_type = other DNA
cagagtgcacaaggaggaagcacaggaagcaacgcacag

SEQ ID NO: 783 - DNA, 39 bp, synthetic construct
  misc_feature 1..39: note = Description of Artificial Sequence: Synthetic oligonucleotide
  source 1..39: mol_type = other DNA
cagagtgcacaaggaccaacaagaccattcctcgcacag

SEQ ID NO: 784 - DNA, 39 bp, synthetic construct
  misc_feature 1..39: note = Description of Artificial Sequence: Synthetic oligonucleotide
  source 1..39: mol_type = other DNA
cagagtgcacaaggaagagacggatgggcagcagcacag

SEQ ID NO: 785 - DNA, 39 bp, synthetic construct
  misc_feature 1..39: note = Description of Artificial Sequence: Synthetic oligonucleotide
  source 1..39: mol_type = other DNA
cagagtgcacaaggaagaatgacagacagccaagcacag

SEQ ID NO: 786 - DNA, 39 bp, synthetic construct
  misc_feature 1..39: note = Description of Artificial Sequence: Synthetic oligonucleotide
  source 1..39: mol_type = other DNA
cagagtgcacaaggaagcgacgtcggaagatgggcacag

SEQ ID NO: 787 - DNA, 39 bp, synthetic construct
  misc_feature 1..39: note = Description of Artificial Sequence: Synthetic oligonucleotide
  source 1..39: mol_type = other DNA
cagagtgcacaaggaagcaacccaggaagatgggcacag

SEQ ID NO: 788 - DNA, 39 bp, synthetic construct
  misc_feature 1..39: note = Description of Artificial Sequence: Synthetic oligonucleotide
  source 1..39: mol_type = other DNA
cagagtgcacaaggaagcaacagcccacaagtcgcacag

SEQ ID NO: 789 - DNA, 39 bp, synthetic construct
  misc_feature 1..39: note = Description of Artificial Sequence: Synthetic oligonucleotide
  source 1..39: mol_type = other DNA
cagagtgcacaaggaagctggaacccaccagcagcacag

SEQ ID NO: 790 - DNA, 39 bp, synthetic construct
  misc_feature 1..39: note = Description of Artificial Sequence: Synthetic oligonucleotide
  source 1..39: mol_type = other DNA
cagagtgcacaaggaacatggaacccaccagcagcacag

SEQ ID NO: 791 - DNA, 39 bp, synthetic construct
  misc_feature 1..39: note = Description of Artificial Sequence: Synthetic oligonucleotide
  source 1..39: mol_type = other DNA
cagagtgcacaaggagtcttcatcccaccaaaagcacag

SEQ ID NO: 792 - DNA, 39 bp, synthetic construct
  misc_feature 1..39: note = Description of Artificial Sequence: Synthetic oligonucleotide
  source 1..39: mol_type = other DNA
cagagtgcacaacacgtcaacgcaagccaaagcgcacag

SEQ ID NO: 793 - DNA, 39 bp, synthetic construct
  misc_feature 1..39: note = Description of Artificial Sequence: Synthetic oligonucleotide
  source 1..39: mol_type = other DNA
cagagtgcacaaatcaaagcaggatgggcacaagcacag

SEQ ID NO: 794 - DNA, 39 bp, synthetic construct
  misc_feature 1..39: note = Description of Artificial Sequence: Synthetic oligonucleotide
  source 1..39: mol_type = other DNA
cagagtgcacaaatcatgagcggatacgcacaagcacag

SEQ ID NO: 795 - DNA, 39 bp, synthetic construct
  misc_feature 1..39: note = Description of Artificial Sequence: Synthetic oligonucleotide
  source 1..39: mol_type = other DNA
cagagtgcacaaaaaagcgtcggaagcgtctacgcacag

SEQ ID NO: 796 - DNA, 39 bp, synthetic construct
  misc_feature 1..39: note = Description of Artificial Sequence: Synthetic oligonucleotide
  source 1..39: mol_type = other DNA
cagagtgcacaactcgaacacggattcgcacaagcacag

SEQ ID NO: 797 - DNA, 39 bp, synthetic construct
  misc_feature 1..39: note = Description of Artificial Sequence: Synthetic oligonucleotide
  source 1..39: mol_type = other DNA
cagagtgcacaactcggaggagtcctcagcgcagcacag

SEQ ID NO: 798 - DNA, 39 bp, synthetic construct
  misc_feature 1..39: note = Description of Artificial Sequence: Synthetic oligonucleotide
  source 1..39: mol_type = other DNA
cagagtgcacaactcggactcagccaaggaagagcacag

SEQ ID NO: 799 - DNA, 39 bp, synthetic construct
  misc_feature 1..39: note = Description of Artificial Sequence: Synthetic oligonucleotide
  source 1..39: mol_type = other DNA
cagagtgcacaactcggatacggattcgcacaagcacag

SEQ ID NO: 800 - DNA, 39 bp, synthetic construct
  misc_feature 1..39: note = Description of Artificial Sequence: Synthetic oligonucleotide
  source 1..39: mol_type = other DNA
cagagtgcacaactcaaatacggactcgcacaagcacag

SEQ ID NO: 801 - DNA, 39 bp, synthetic construct
  misc_feature 1..39: note = Description of Artificial Sequence: Synthetic oligonucleotide
  source 1..39: mol_type = other DNA
cagagtgcacaactcagaatcggattcgcacaagcacag

SEQ ID NO: 802 - DNA, 39 bp, synthetic construct
  misc_feature 1..39: note = Description of Artificial Sequence: Synthetic oligonucleotide
  source 1..39: mol_type = other DNA
cagagtgcacaactcagaatgggatacagccaagcacag

SEQ ID NO: 803 - DNA, 39 bp, synthetic construct
  misc_feature 1..39: note = Description of Artificial Sequence: Synthetic oligonucleotide
  source 1..39: mol_type = other DNA
cagagtgcacaactcagacaaggatacgcacaagcacag

SEQ ID NO: 804 - DNA, 39 bp, synthetic construct
  misc_feature 1..39: note = Description of Artificial Sequence: Synthetic oligonucleotide
  source 1..39: mol_type = other DNA
cagagtgcacaactcagagtcggattcgcacaagcacag

SEQ ID NO: 805 - DNA, 39 bp, synthetic construct
  misc_feature 1..39: note = Description of Artificial Sequence: Synthetic oligonucleotide
  source 1..39: mol_type = other DNA
cagagtgcacaactcagctgcagaagccaaatggcacag

SEQ ID NO: 806 - DNA, 39 bp, synthetic construct
  misc_feature 1..39: note = Description of Artificial Sequence: Synthetic oligonucleotide
  source 1..39: mol_type = other DNA
cagagtgcacaactcacatacagccaaagcctcgcacag

SEQ ID NO: 807 - DNA, 39 bp, synthetic construct
  misc_feature 1..39: note = Description of Artificial Sequence: Synthetic oligonucleotide
  source 1..39: mol_type = other DNA
cagagtgcacaactctacaaaggatacagccaagcacag

SEQ ID NO: 808 - DNA, 39 bp, synthetic construct
  misc_feature 1..39: note = Description of Artificial Sequence: Synthetic oligonucleotide
  source 1..39: mol_type = other DNA
cagagtgcacaaatgccacaaagaccattcctcgcacag

SEQ ID NO: 809 - DNA, 39 bp, synthetic construct
  misc_feature 1..39: note = Description of Artificial Sequence: Synthetic oligonucleotide
  source 1..39: mol_type = other DNA
cagagtgcacaaaacggaaacccaggaagatgggcacag

SEQ ID NO: 810 - DNA, 39 bp, synthetic construct
  misc_feature 1..39: note = Description of Artificial Sequence: Synthetic oligonucleotide
  source 1..39: mol_type = other DNA
cagagtgcacaaccagaaggaagcgcaagatgggcacag

SEQ ID NO: 811 - DNA, 39 bp, synthetic construct
  misc_feature 1..39: note = Description of Artificial Sequence: Synthetic oligonucleotide
  source 1..39: mol_type = other DNA
cagagtgcacaaccactcgcagtctacggagcagcacag

SEQ ID NO: 812 - DNA, 39 bp, synthetic construct
  misc_feature 1..39: note = Description of Artificial Sequence: Synthetic oligonucleotide
  source 1..39: mol_type = other DNA
cagagtgcacaaccacaaagcagcagcatgagcgcacag

SEQ ID NO: 813 - DNA, 39 bp, synthetic construct
  misc_feature 1..39: note = Description of Artificial Sequence: Synthetic oligonucleotide
  source 1..39: mol_type = other DNA
cagagtgcacaaccaagcgtcggaggatactgggcacag

SEQ ID NO: 814 - DNA, 39 bp, synthetic construct
  misc_feature 1..39: note = Description of Artificial Sequence: Synthetic oligonucleotide
  source 1..39: mol_type = other DNA
cagagtgcacaacaagcagtcggacaaagctgggcacag

SEQ ID NO: 815 - DNA, 39 bp, synthetic construct
  misc_feature 1..39: note = Description of Artificial Sequence: Synthetic oligonucleotide
  source 1..39: mol_type = other DNA
cagagtgcacaacaaagaagcctcgcaagcggagcacag

SEQ ID NO: 816 - DNA, 39 bp, synthetic construct
  misc_feature 1..39: note = Description of Artificial Sequence: Synthetic oligonucleotide
  source 1..39: mol_type = other DNA
cagagtgcacaacaagtcatgaacagccaaggagcacag

SEQ ID NO: 817 - DNA, 39 bp, synthetic construct
  misc_feature 1..39: note = Description of Artificial Sequence: Synthetic oligonucleotide
  source 1..39: mol_type = other DNA
cagagtgcacaaagaggagtcggactcagccaagcacag

SEQ ID NO: 818 - DNA, 39 bp, synthetic construct
  misc_feature 1..39: note = Description of Artificial Sequence: Synthetic oligonucleotide
  source 1..39: mol_type = other DNA
cagagtgcacaaagacacgacgcagaaggaagcgcacag

SEQ ID NO: 819 - DNA, 39 bp, synthetic construct
  misc_feature 1..39: note = Description of Artificial Sequence: Synthetic oligonucleotide
  source 1..39: mol_type = other DNA
cagagtgcacaaagaaaaggagaaccacactacgcacag

SEQ ID NO: 820 - DNA, 39 bp, synthetic construct
  misc_feature 1..39: note = Description of Artificial Sequence: Synthetic oligonucleotide
  source 1..39: mol_type = other DNA
cagagtgcacaaagatacacaggagacagcagcgcacag

SEQ ID NO: 821 - DNA, 39 bp, synthetic construct
  misc_feature 1..39: note = Description of Artificial Sequence: Synthetic oligonucleotide
  source 1..39: mol_type = other DNA
cagagtgcacaaagcgcaatggcagcaaaaggagcacag

SEQ ID NO: 822 - DNA, 39 bp, synthetic construct
  misc_feature 1..39: note = Description of Artificial Sequence: Synthetic oligonucleotide
  source 1..39: mol_type = other DNA
cagagtgcacaaagcggaggactcacaggaagcgcacag

SEQ ID NO: 823 - DNA, 39 bp, synthetic construct
  misc_feature 1..39: note = Description of Artificial Sequence: Synthetic oligonucleotide
  source 1..39: mol_type = other DNA
cagagtgcacaaagcggaggagtcggacaagtcgcacag

SEQ ID NO: 824 - DNA, 39 bp, synthetic construct
  misc_feature 1..39: note = Description of Artificial Sequence: Synthetic oligonucleotide
  source 1..39: mol_type = other DNA
cagagtgcacaaagcctcgcaacaccattcagagcacag

SEQ ID NO: 825 - DNA, 39 bp, synthetic construct
  misc_feature 1..39: note = Description of Artificial Sequence: Synthetic oligonucleotide
  source 1..39: mol_type = other DNA
cagagtgcacaaagcatgagcagaccattcctcgcacag

SEQ ID NO: 826 - DNA, 39 bp, synthetic construct
  misc_feature 1..39: note = Description of Artificial Sequence: Synthetic oligonucleotide
  source 1..39: mol_type = other DNA
cagagtgcacaaagccaactcagaccattcctcgcacag

SEQ ID NO: 827 - DNA, 39 bp, synthetic construct
  misc_feature 1..39: note = Description of Artificial Sequence: Synthetic oligonucleotide
  source 1..39: mol_type = other DNA
cagagtgcacaaagcgtcgcaaaaccattcctcgcacag

SEQ ID NO: 828 - DNA, 39 bp, synthetic construct
  misc_feature 1..39: note = Description of Artificial Sequence: Synthetic oligonucleotide
  source 1..39: mol_type = other DNA
cagagtgcacaaagcgtcagccaaccattcagagcacag

SEQ ID NO: 829 - DNA, 39 bp, synthetic construct
  misc_feature 1..39: note = Description of Artificial Sequence: Synthetic oligonucleotide
  source 1..39: mol_type = other DNA
cagagtgcacaaagcgtcgtcagaccattcctcgcacag

SEQ ID NO: 830 - DNA, 39 bp, synthetic construct
  misc_feature 1..39: note = Description of Artificial Sequence: Synthetic oligonucleotide
  source 1..39: mol_type = other DNA
cagagtgcacaaacagcactcagcagcagcacagcacag

SEQ ID NO: 831 - DNA, 39 bp, synthetic construct
  misc_feature 1..39: note = Description of Artificial Sequence: Synthetic oligonucleotide
  source 1..39: mol_type = other DNA
cagagtgcacaaacagaaatgggaggaagatgcgcacag

SEQ ID NO: 832 - DNA, 39 bp, synthetic construct
  misc_feature 1..39: note = Description of Artificial Sequence: Synthetic oligonucleotide
  source 1..39: mol_type = other DNA
cagagtgcacaaacaggattcgcaccaccaagagcacag

SEQ ID NO: 833 - DNA, 39 bp, synthetic construct
  misc_feature 1..39: note = Description of Artificial Sequence: Synthetic oligonucleotide
  source 1..39: mol_type = other DNA
cagagtgcacaaacaatcagaggatacagcagcgcacag

SEQ ID NO: 834 - DNA, 39 bp, synthetic construct
  misc_feature 1..39: note = Description of Artificial Sequence: Synthetic oligonucleotide
  source 1..39: mol_type = other DNA
cagagtgcacaaacaatcagcaactaccacacagcacag

SEQ ID NO: 835 - DNA, 39 bp, synthetic construct
  misc_feature 1..39: note = Description of Artificial Sequence: Synthetic oligonucleotide
  source 1..39: mol_type = other DNA
cagagtgcacaaacactcgcaagaccattcgtcgcacag

SEQ ID NO: 836 - DNA, 39 bp, synthetic construct
  misc_feature 1..39: note = Description of Artificial Sequence: Synthetic oligonucleotide
  source 1..39: mol_type = other DNA
cagagtgcacaaacactcgcagtcccattcaaagcacag

SEQ ID NO: 837 - DNA, 39 bp, synthetic construct
  misc_feature 1..39: note = Description of Artificial Sequence: Synthetic oligonucleotide
  source 1..39: mol_type = other DNA
cagagtgcacaaacaccagacagaccatggctcgcacag

SEQ ID NO: 838 - DNA, 39 bp, synthetic construct
  misc_feature 1..39: note = Description of Artificial Sequence: Synthetic oligonucleotide
  source 1..39: mol_type = other DNA
cagagtgcacaaacaagagcaggatacgcacaagcacag

SEQ ID NO: 839 - DNA, 39 bp, synthetic construct
  misc_feature 1..39: note = Description of Artificial Sequence: Synthetic oligonucleotide
  source 1..39: mol_type = other DNA
cagagtgcacaaacaagagcaggatacagccaagcacag

SEQ ID NO: 840 - DNA, 39 bp, synthetic construct
  misc_feature 1..39: note = Description of Artificial Sequence: Synthetic oligonucleotide
  source 1..39: mol_type = other DNA
cagagtgcacaaacaagagaatacctcctcggagcacag

SEQ ID NO: 841 - DNA, 39 bp, synthetic construct
  misc_feature 1..39: note = Description of Artificial Sequence: Synthetic oligonucleotide
  source 1..39: mol_type = other DNA
cagagtgcacaaacaagcgcaaaaccattcctcgcacag

SEQ ID NO: 842 - DNA, 39 bp, synthetic construct
  misc_feature 1..39: note = Description of Artificial Sequence: Synthetic oligonucleotide
  source 1..39: mol_type = other DNA
cagagtgcacaaacaagcgcaagaccattcctcgcacag

SEQ ID NO: 843 - DNA, 39 bp, synthetic construct
  misc_feature 1..39: note = Description of Artificial Sequence: Synthetic oligonucleotide
  source 1..39: mol_type = other DNA
cagagtgcacaaacaacagacagaccattcctcgcacag

SEQ ID NO: 844 - DNA, 39 bp, synthetic construct
  misc_feature 1..39: note = Description of Artificial Sequence: Synthetic oligonucleotide
  source 1..39: mol_type = other DNA
cagagtgcacaaacaacagaaaaaccatggctcgcacag

SEQ ID NO: 845 - DNA, 39 bp, synthetic construct
  misc_feature 1..39: note = Description of Artificial Sequence: Synthetic oligonucleotide
  source 1..39: mol_type = other DNA
cagagtgcacaaacagtcgcaagaccattctacgcacag

SEQ ID NO: 846 - DNA, 39 bp, synthetic construct
  misc_feature 1..39: note = Description of Artificial Sequence: Synthetic oligonucleotide
  source 1..39: mol_type = other DNA
cagagtgcacaaacagtcgcaacaccattcagagcacag

SEQ ID NO: 847 - DNA, 39 bp, synthetic construct
  misc_feature 1..39: note = Description of Artificial Sequence: Synthetic oligonucleotide
  source 1..39: mol_type = other DNA
cagagtgcacaaacagtcacacaactcttcaaagcacag

SEQ ID NO: 848 - DNA, 39 bp, synthetic construct
  misc_feature 1..39: note = Description of Artificial Sequence: Synthetic oligonucleotide
  source 1..39: mol_type = other DNA
cagagtgcacaagtccacgtcggaagcgtctacgcacag

SEQ ID NO: 849 - DNA, 39 bp, synthetic construct
  misc_feature 1..39: note = Description of Artificial Sequence: Synthetic oligonucleotide
  source 1..39: mol_type = other DNA
cagagtgcacaagtcctcgcaggatacaacatggcacag

SEQ ID NO: 850 - DNA, 39 bp, synthetic construct
  misc_feature 1..39: note = Description of Artificial Sequence: Synthetic oligonucleotide
  source 1..39: mol_type = other DNA
cagagtgcacaagtcagcgaagcaagagtcagagcacag

SEQ ID NO: 851 - DNA, 39 bp, synthetic construct
  misc_feature 1..39: note = Description of Artificial Sequence: Synthetic oligonucleotide
  source 1..39: mol_type = other DNA
cagagtgcacaagtcgtcgtcggatacagccaagcacag

SEQ ID NO: 852 - DNA, 39 bp, synthetic construct
  misc_feature 1..39: note = Description of Artificial Sequence: Synthetic oligonucleotide
  source 1..39: mol_type = other DNA
cagagtgcacaatgggcagcaggatacaacgtcgcacag

SEQ ID NO: 853 - DNA, 39 bp, synthetic construct
  misc_feature 1..39: note = Description of Artificial Sequence: Synthetic oligonucleotide
  source 1..39: mol_type = other DNA
cagagtgcacaatgggaactcagcaacggatacgcacag

SEQ ID NO: 854 - DNA, 39 bp, synthetic construct
  misc_feature 1..39: note = Description of Artificial Sequence: Synthetic oligonucleotide
  source 1..39: mol_type = other DNA
cagagtgcacaatgggaagtcaaaggaggatacgcacag

SEQ ID NO: 855 - DNA, 39 bp, synthetic construct
  misc_feature 1..39: note = Description of Artificial Sequence: Synthetic oligonucleotide
  source 1..39: mol_type = other DNA
cagagtgcacaatgggaagtcaaaagaggatacgcacag

SEQ ID NO: 856 - DNA, 39 bp, synthetic construct
  misc_feature 1..39: note = Description of Artificial Sequence: Synthetic oligonucleotide
  source 1..39: mol_type = other DNA
cagagtgcacaatgggaagtccaaagcggattcgcacag

SEQ ID NO: 857 - DNA, 39 bp, synthetic construct
  misc_feature 1..39: note = Description of Artificial Sequence: Synthetic oligonucleotide
  source 1..39: mol_type = other DNA
cagagtgcacaatgggaagtcagaggaggatacgcacag

SEQ ID NO: 858 - DNA, 39 bp, synthetic construct
  misc_feature 1..39: note = Description of Artificial Sequence: Synthetic oligonucleotide
  source 1..39: mol_type = other DNA
cagagtgcacaatgggaagtcacaagcggatgggcacag

SEQ ID NO: 859 - DNA, 39 bp, synthetic construct
  misc_feature 1..39: note = Description of Artificial Sequence: Synthetic oligonucleotide
  source 1..39: mol_type = other DNA
cagagtgcacaatggggagcaccaagccacggagcacag

SEQ ID NO: 860 - DNA, 39 bp, synthetic construct
  misc_feature 1..39: note = Description of Artificial Sequence: Synthetic oligonucleotide
  source 1..39: mol_type = other DNA
cagagtgcacaatggatggaactcggaagcagcgcacag

SEQ ID NO: 861 - DNA, 39 bp, synthetic construct
  misc_feature 1..39: note = Description of Artificial Sequence: Synthetic oligonucleotide
  source 1..39: mol_type = other DNA
cagagtgcacaatggatgttcggaggaagcggagcacag

SEQ ID NO: 862 - DNA, 39 bp, synthetic construct
  misc_feature 1..39: note = Description of Artificial Sequence: Synthetic oligonucleotide
  source 1..39: mol_type = other DNA
cagagtgcacaatggatgctcggaggagcacaagcacag

SEQ ID NO: 863 - DNA, 39 bp, synthetic construct
  misc_feature 1..39: note = Description of Artificial Sequence: Synthetic oligonucleotide
  source 1..39: mol_type = other DNA
cagagtgcacaatggccaacagcatacgacgcagcacag

SEQ ID NO: 864 - DNA, 39 bp, synthetic construct
  misc_feature 1..39: note = Description of Artificial Sequence: Synthetic oligonucleotide
  source 1..39: mol_type = other DNA
cagagtgcacaatggccaacaagctacgacgcagcacag

SEQ ID NO: 865 - DNA, 39 bp, synthetic construct
  misc_feature 1..39: note = Description of Artificial Sequence: Synthetic oligonucleotide
  source 1..39: mol_type = other DNA
cagagtgcacaatggcaagtccaaacaggattcgcacag

SEQ ID NO: 866 - DNA, 39 bp, synthetic construct
  misc_feature 1..39: note = Description of Artificial Sequence: Synthetic oligonucleotide
  source 1..39: mol_type = other DNA
cagagtgcacaatggagcacagaaggaggatacgcacag

SEQ ID NO: 867 - DNA, 39 bp, synthetic construct
  misc_feature 1..39: note = Description of Artificial Sequence: Synthetic oligonucleotide
  source 1..39: mol_type = other DNA
cagagtgcacaatggacagcagcaggaggatacgcacag

SEQ ID NO: 868 - DNA, 39 bp, synthetic construct
  misc_feature 1..39: note = Description of Artificial Sequence: Synthetic oligonucleotide
  source 1..39: mol_type = other DNA
cagagtgcacaatggacaacagaaagcggatacgcacag

SEQ ID NO: 869 - DNA, 39 bp, synthetic construct
  misc_feature 1..39: note = Description of Artificial Sequence: Synthetic oligonucleotide
  source 1..39: mol_type = other DNA
cagagtgcacaatgggtctacggaagcagccacgcacag

SEQ ID NO: 870 - DNA, 39 bp, synthetic construct
  misc_feature 1..39: note = Description of Artificial Sequence: Synthetic oligonucleotide
  source 1..39: mol_type = other DNA
cagagtgcacaatacctcgcaggatacacagtcgcacag

SEQ ID NO: 871 - DNA, 39 bp, synthetic construct
  misc_feature 1..39: note = Description of Artificial Sequence: Synthetic oligonucleotide
  source 1..39: mol_type = other DNA
cagagtgcacaatacctcaaaggatacagcgtcgcacag

SEQ ID NO: 872 - DNA, 39 bp, synthetic construct
  misc_feature 1..39: note = Description of Artificial Sequence: Synthetic oligonucleotide
  source 1..39: mol_type = other DNA
cagagtgcacaatacctcagcggatacaacacagcacag

SEQ ID NO: 873 - DNA, 39 bp, synthetic construct
  misc_feature 1..39: note = Description of Artificial Sequence: Synthetic oligonucleotide
  source 1..39: mol_type = other DNA
cagagtgacggagcagcagcaacaacaggatgggcacag

SEQ ID NO: 874 - DNA, 39 bp, synthetic construct
  misc_feature 1..39: note = Description of Artificial Sequence: Synthetic oligonucleotide
  source 1..39: mol_type = other DNA
cagagtgacggagcaggaggaacaagcggatgggcacag

SEQ ID NO: 875 - DNA, 39 bp, synthetic construct
  misc_feature 1..39: note = Description of Artificial Sequence: Synthetic oligonucleotide
  source 1..39: mol_type = other DNA
cagagtgacggagcaggaacaacaagcggatgggcacag

SEQ ID NO: 876 - DNA, 39 bp, synthetic construct
  misc_feature 1..39: note = Description of Artificial Sequence: Synthetic oligonucleotide
  source 1..39: mol_type = other DNA
cagagtgacggagcacacggactcagcggatgggcacag

SEQ ID NO: 877 - DNA, 39 bp, synthetic construct
  misc_feature 1..39: note = Description of Artificial Sequence: Synthetic oligonucleotide
  source 1..39: mol_type = other DNA
cagagtgacggagcacacgtcggactcagcagcgcacag

SEQ ID NO: 878 - DNA, 39 bp, synthetic construct
  misc_feature 1..39: note = Description of Artificial Sequence: Synthetic oligonucleotide
  source 1..39: mol_type = other DNA
cagagtgacggagcaagaacagtcctccaactcgcacag

SEQ ID NO: 879 - DNA, 39 bp, synthetic construct
  misc_feature 1..39: note = Description of Artificial Sequence: Synthetic oligonucleotide
  source 1..39: mol_type = other DNA
cagagtgacggagaataccaaaaaccattcagagcacag

SEQ ID NO: 880 - DNA, 39 bp, synthetic construct
  misc_feature 1..39: note = Description of Artificial Sequence: Synthetic oligonucleotide
  source 1..39: mol_type = other DNA
cagagtgacggaggaggaacaacaacaggatgggcacag

SEQ ID NO: 881 - DNA, 39 bp, synthetic construct
  misc_feature 1..39: note = Description of Artificial Sequence: Synthetic oligonucleotide
  source 1..39: mol_type = other DNA
cagagtgacggacacgcaacaagcatgggatgggcacag

SEQ ID NO: 882 - DNA, 39 bp, synthetic construct
  misc_feature 1..39: note = Description of Artificial Sequence: Synthetic oligonucleotide
  source 1..39: mol_type = other DNA
cagagtgacggaaaaggaagcacacaaggatgggcacag

SEQ ID NO: 883 - DNA, 39 bp, synthetic construct
  misc_feature 1..39: note = Description of Artificial Sequence: Synthetic oligonucleotide
  source 1..39: mol_type = other DNA
cagagtgacggaaaacaataccaactcagcagcgcacag

SEQ ID NO: 884 - DNA, 39 bp, synthetic construct
  misc_feature 1..39: note = Description of Artificial Sequence: Synthetic oligonucleotide
  source 1..39: mol_type = other DNA
cagagtgacggaaacggaggactcaaaggatgggcacag

SEQ ID NO: 885 - DNA, 39 bp, synthetic construct
  misc_feature 1..39: note = Description of Artificial Sequence: Synthetic oligonucleotide
  source 1..39: mol_type = other DNA
cagagtgacggacaaggaggactcagcggatgggcacag

SEQ ID NO: 886 - DNA, 39 bp, synthetic construct
  misc_feature 1..39: note = Description of Artificial Sequence: Synthetic oligonucleotide
  source 1..39: mol_type = other DNA
cagagtgacggacaacacttcgcaccaccaagagcacag

SEQ ID NO: 887 - DNA, 39 bp, synthetic construct
  misc_feature 1..39: note = Description of Artificial Sequence: Synthetic oligonucleotide
  source 1..39: mol_type = other DNA
cagagtgacggaagagcaacaaaaacactctacgcacag

SEQ ID NO: 888 - DNA, 39 bp, synthetic construct
  misc_feature 1..39: note = Description of Artificial Sequence: Synthetic oligonucleotide
  source 1..39: mol_type = other DNA
cagagtgacggaagaaacgcactcacaggatgggcacag

SEQ ID NO: 889 - DNA, 39 bp, synthetic construct
  misc_feature 1..39: note = Description of Artificial Sequence: Synthetic oligonucleotide
  source 1..39: mol_type = other DNA
cagagtgacggaagaagacaagtcatccaactcgcacag

SEQ ID NO: 890 - DNA, 39 bp, synthetic construct
  misc_feature 1..39: note = Description of Artificial Sequence: Synthetic oligonucleotide
  source 1..39: mol_type = other DNA
cagagtgacggaagagtctacggactcagcagcgcacag

SEQ ID NO: 891 - DNA, 39 bp, synthetic construct
  misc_feature 1..39: note = Description of Artificial Sequence: Synthetic oligonucleotide
  source 1..39: mol_type = other DNA
cagagtgacggaagcggaagaacaacaggatgggcacag

SEQ ID NO: 892 - DNA, 39 bp, synthetic construct
  misc_feature 1..39: note = Description of Artificial Sequence: Synthetic oligonucleotide
  source 1..39: mol_type = other DNA
cagagtgacggaagcggaacaacaagaggatgggcacag

SEQ ID NO: 893 - DNA, 39 bp, synthetic construct
  misc_feature 1..39: note = Description of Artificial Sequence: Synthetic oligonucleotide
  source 1..39: mol_type = other DNA
cagagtgacggaagcggaacagtcagcggatgggcacag

SEQ ID NO: 894 - DNA, 39 bp, synthetic construct
  misc_feature 1..39: note = Description of Artificial Sequence: Synthetic oligonucleotide
  source 1..39: mol_type = other DNA
cagagtgacggaagcccagaaaaaccattcagagcacag

SEQ ID NO: 895 - DNA, 39 bp, synthetic construct
  misc_feature 1..39: note = Description of Artificial Sequence: Synthetic oligonucleotide
  source 1..39: mol_type = other DNA
cagagtgacggaagccaaagcacaacaggatgggcacag

SEQ ID NO: 896 - DNA, 39 bp, synthetic construct
  misc_feature 1..39: note = Description of Artificial Sequence: Synthetic oligonucleotide
  source 1..39: mol_type = other DNA
cagagtgacggaagcagcttctacccaccaaaagcacag

SEQ ID NO: 897 - DNA, 39 bp, synthetic construct
  misc_feature 1..39: note = Description of Artificial Sequence: Synthetic oligonucleotide
  source 1..39: mol_type = other DNA
cagagtgacggaagcagcagctactacgacgcagcacag

SEQ ID NO: 898 - DNA, 39 bp, synthetic construct
  misc_feature 1..39: note = Description of Artificial Sequence: Synthetic oligonucleotide
  source 1..39: mol_type = other DNA
cagagtgacggaagcacagaaagaccattcagagcacag

SEQ ID NO: 899 - DNA, 39 bp, synthetic construct
  misc_feature 1..39: note = Description of Artificial Sequence: Synthetic oligonucleotide
  source 1..39: mol_type = other DNA
cagagtgacggaacagcagcaagactcagcagcgcacag

SEQ ID NO: 900 - DNA, 39 bp, synthetic construct
  misc_feature 1..39: note = Description of Artificial Sequence: Synthetic oligonucleotide
  source 1..39: mol_type = other DNA
cagagtgacggaacagcagacaaaccattcagagcacag

SEQ ID NO: 901 - DNA, 39 bp, synthetic construct
  misc_feature 1..39: note = Description of Artificial Sequence: Synthetic oligonucleotide
  source 1..39: mol_type = other DNA
cagagtgacggaacagcagacagaccattcagagcacag

SEQ ID NO: 902 - DNA, 39 bp, synthetic construct
  misc_feature 1..39: note = Description of Artificial Sequence: Synthetic oligonucleotide
  source 1..39: mol_type = other DNA
cagagtgacggaacagcagaaagaccattcagagcacag

SEQ ID NO: 903 - DNA, 39 bp, synthetic construct
  misc_feature 1..39: note = Description of Artificial Sequence: Synthetic oligonucleotide
  source 1..39: mol_type = other DNA
cagagtgacggaacagcaatccacctcagcagcgcacag

SEQ ID NO: 904 - DNA, 39 bp, synthetic construct
  misc_feature 1..39: note = Description of Artificial Sequence: Synthetic oligonucleotide
  source 1..39: mol_type = other DNA
cagagtgacggaacagcaatctacctcagcagcgcacag

SEQ ID NO: 905 - DNA, 39 bp, synthetic construct
  misc_feature 1..39: note = Description of Artificial Sequence: Synthetic oligonucleotide
  source 1..39: mol_type = other DNA
cagagtgacggaacagcactcatgctcagcagcgcacag

SEQ ID NO: 906 - DNA, 39 bp, synthetic construct
  misc_feature 1..39: note = Description of Artificial Sequence: Synthetic oligonucleotide
  source 1..39: mol_type = other DNA
cagagtgacggaacagcaagcatcagcggatgggcacag

SEQ ID NO: 907 - DNA, 39 bp, synthetic construct
  misc_feature 1..39: note = Description of Artificial Sequence: Synthetic oligonucleotide
  source 1..39: mol_type = other DNA
cagagtgacggaacagcaagcacaagcggatgggcacag

SEQ ID NO: 908 - DNA, 39 bp, synthetic construct
  misc_feature 1..39: note = Description of Artificial Sequence: Synthetic oligonucleotide
  source 1..39: mol_type = other DNA
cagagtgacggaacagcaagcgtcacaggatgggcacag

SEQ ID NO: 909 - DNA, 39 bp, synthetic construct
  misc_feature 1..39: note = Description of Artificial Sequence: Synthetic oligonucleotide
  source 1..39: mol_type = other DNA
cagagtgacggaacagcaagctactacgacagcgcacag

SEQ ID NO: 910 - DNA, 39 bp, synthetic construct
  misc_feature 1..39: note = Description of Artificial Sequence: Synthetic oligonucleotide
  source 1..39: mol_type = other DNA
cagagtgacggaacagcaacaacaatgggatgggcacag

SEQ ID NO: 911 - DNA, 39 bp, synthetic construct
  misc_feature 1..39: note = Description of Artificial Sequence: Synthetic oligonucleotide
  source 1..39: mol_type = other DNA
cagagtgacggaacagcaacaacaacaggatgggcacag

SEQ ID NO: 912 - DNA, 39 bp, synthetic construct
  misc_feature 1..39: note = Description of Artificial Sequence: Synthetic oligonucleotide
  source 1..39: mol_type = other DNA
cagagtgacggaacagcatacagactcagcagcgcacag

SEQ ID NO: 913 - DNA, 39 bp, synthetic construct
  misc_feature 1..39: note = Description of Artificial Sequence: Synthetic oligonucleotide
  source 1..39: mol_type = other DNA
cagagtgacggaacagacaaaatgtggagcatcgcacag

SEQ ID NO: 914 - DNA, 39 bp, synthetic construct
  misc_feature 1..39: note = Description of Artificial Sequence: Synthetic oligonucleotide
  source 1..39: mol_type = other DNA
cagagtgacggaacaggaggaatcaaaggatgggcacag

SEQ ID NO: 915 - DNA, 39 bp, synthetic construct
  misc_feature 1..39: note = Description of Artificial Sequence: Synthetic oligonucleotide
  source 1..39: mol_type = other DNA
cagagtgacggaacaggaggaatcatgggatgggcacag

SEQ ID NO: 916 - DNA, 39 bp, synthetic construct
  misc_feature 1..39: note = Description of Artificial Sequence: Synthetic oligonucleotide
  source 1..39: mol_type = other DNA
cagagtgacggaacaggaggaatcagcggatgggcacag

SEQ ID NO: 917 - DNA, 39 bp, synthetic construct
  misc_feature 1..39: note = Description of Artificial Sequence: Synthetic oligonucleotide
  source 1..39: mol_type = other DNA
cagagtgacggaacaggaggactcgcaggatgggcacag

SEQ ID NO: 918 - DNA, 39 bp, synthetic construct
  misc_feature 1..39: note = Description of Artificial Sequence: Synthetic oligonucleotide
  source 1..39: mol_type = other DNA
cagagtgacggaacaggaggactccacggatgggcacag

SEQ ID NO: 919 - DNA, 39 bp, synthetic construct
  misc_feature 1..39: note = Description of Artificial Sequence: Synthetic oligonucleotide
  source 1..39: mol_type = other DNA
cagagtgacggaacaggaggactccaaggatgggcacag

SEQ ID NO: 920 - DNA, 39 bp, synthetic construct
  misc_feature 1..39: note = Description of Artificial Sequence: Synthetic oligonucleotide
  source 1..39: mol_type = other DNA
cagagtgacggaacaggaggactcagaggatgggcacag

SEQ ID NO: 921 - DNA, 39 bp, synthetic construct
  misc_feature 1..39: note = Description of Artificial Sequence: Synthetic oligonucleotide
  source 1..39: mol_type = other DNA
cagagtgacggaacaggaggactcagcggatgggcacag

SEQ ID NO: 922 - DNA, 39 bp, synthetic construct
  misc_feature 1..39: note = Description of Artificial Sequence: Synthetic oligonucleotide
  source 1..39: mol_type = other DNA
cagagtgacggaacaggaggactcacaggatgggcacag

SEQ ID NO: 923 - DNA, 39 bp, synthetic construct
  misc_feature 1..39: note = Description of Artificial Sequence: Synthetic oligonucleotide
  source 1..39: mol_type = other DNA
cagagtgacggaacaggaggaacaaaaggatgggcacag

SEQ ID NO: 924 - DNA, 39 bp, synthetic construct
  misc_feature 1..39: note = Description of Artificial Sequence: Synthetic oligonucleotide
  source 1..39: mol_type = other DNA
cagagtgacggaacaggaggaacaagcggatgggcacag

SEQ ID NO: 925 - DNA, 39 bp, synthetic construct
  misc_feature 1..39: note = Description of Artificial Sequence: Synthetic oligonucleotide
  source 1..39: mol_type = other DNA
cagagtgacggaacaggaggagtccacggatgggcacag

SEQ ID NO: 926 - DNA, 39 bp, synthetic construct
  misc_feature 1..39: note = Description of Artificial Sequence: Synthetic oligonucleotide
  source 1..39: mol_type = other DNA
cagagtgacggaacaggaggagtcatgggatgggcacag

SEQ ID NO: 927 - DNA, 39 bp, synthetic construct
  misc_feature 1..39: note = Description of Artificial Sequence: Synthetic oligonucleotide
  source 1..39: mol_type = other DNA
cagagtgacggaacaggaggagtcagcggatgggcacag

SEQ ID NO: 928 - DNA, 39 bp, synthetic construct
  misc_feature 1..39: note = Description of Artificial Sequence: Synthetic oligonucleotide
  source 1..39: mol_type = other DNA
cagagtgacggaacaggaggagtcacaggatgggcacag

SEQ ID NO: 929 - DNA, 39 bp, synthetic construct
  misc_feature 1..39: note = Description of Artificial Sequence: Synthetic oligonucleotide
  source 1..39: mol_type = other DNA
cagagtgacggaacaggaggagtctacggatgggcacag

SEQ ID NO: 930 - DNA, 39 bp, synthetic construct
  misc_feature 1..39: note = Description of Artificial Sequence: Synthetic oligonucleotide
  source 1..39: mol_type = other DNA
cagagtgacggaacaggaaacctccaaggatgggcacag

SEQ ID NO: 931 - DNA, 39 bp, synthetic construct
  misc_feature 1..39: note = Description of Artificial Sequence: Synthetic oligonucleotide
  source 1..39: mol_type = other DNA
cagagtgacggaacaggaaacctcagaggatgggcacag

SEQ ID NO: 932 - DNA, 39 bp, synthetic construct
  misc_feature 1..39: note = Description of Artificial Sequence: Synthetic oligonucleotide
  source 1..39: mol_type = other DNA
cagagtgacggaacaggaaacctcagcggatgggcacag

SEQ ID NO: 933 - DNA, 39 bp, synthetic construct
  misc_feature 1..39: note = Description of Artificial Sequence: Synthetic oligonucleotide
  source 1..39: mol_type = other DNA
cagagtgacggaacaggaaacacacacggatgggcacag

SEQ ID NO: 934 - DNA, 39 bp, synthetic construct
  misc_feature 1..39: note = Description of Artificial Sequence: Synthetic oligonucleotide
  source 1..39: mol_type = other DNA
cagagtgacggaacaggaaacacaagaggatgggcacag

SEQ ID NO: 935 - DNA, 39 bp, synthetic construct
  misc_feature 1..39: note = Description of Artificial Sequence: Synthetic oligonucleotide
  source 1..39: mol_type = other DNA
cagagtgacggaacaggaaacacaagcggatgggcacag

SEQ ID NO: 936 - DNA, 39 bp, synthetic construct
  misc_feature 1..39: note = Description of Artificial Sequence: Synthetic oligonucleotide
  source 1..39: mol_type = other DNA
cagagtgacggaacaggaaacgtcagcggatgggcacag

SEQ ID NO: 937 - DNA, 39 bp, synthetic construct
  misc_feature 1..39: note = Description of Artificial Sequence: Synthetic oligonucleotide
  source 1..39: mol_type = other DNA
cagagtgacggaacaggaaacgtcacaggatgggcacag

SEQ ID NO: 938 - DNA, 39 bp, synthetic construct
  misc_feature 1..39: note = Description of Artificial Sequence: Synthetic oligonucleotide
  source 1..39: mol_type = other DNA
cagagtgacggaacaggacaactcgtcggatgggcacag

SEQ ID NO: 939 - DNA, 39 bp, synthetic construct
  misc_feature 1..39: note = Description of Artificial Sequence: Synthetic oligonucleotide
  source 1..39: mol_type = other DNA
cagagtgacggaacaggacaaacaatcggatgggcacag

SEQ ID NO: 940 - DNA, 39 bp, synthetic construct
  misc_feature 1..39: note = Description of Artificial Sequence: Synthetic oligonucleotide
  source 1..39: mol_type = other DNA
cagagtgacggaacaggacaagtcacaggatgggcacag

SEQ ID NO: 941 - DNA, 39 bp, synthetic construct
  misc_feature 1..39: note = Description of Artificial Sequence: Synthetic oligonucleotide
  source 1..39: mol_type = other DNA
cagagtgacggaacaggaagactcacaggatgggcacag

SEQ ID NO: 942 - DNA, 39 bp, synthetic construct
  misc_feature 1..39: note = Description of Artificial Sequence: Synthetic oligonucleotide
  source 1..39: mol_type = other DNA
cagagtgacggaacaggaagaacagtcggatgggcacag

SEQ ID NO: 943 - DNA, 39 bp, synthetic construct
  misc_feature 1..39: note = Description of Artificial Sequence: Synthetic oligonucleotide
  source 1..39: mol_type = other DNA
cagagtgacggaacaggaagcggaatgatgacagcacag

SEQ ID NO: 944 - DNA, 39 bp, synthetic construct
  misc_feature 1..39: note = Description of Artificial Sequence: Synthetic oligonucleotide
  source 1..39: mol_type = other DNA
cagagtgacggaacaggaagcatcagcggatgggcacag

SEQ ID NO: 945 - DNA, 39 bp, synthetic construct
  misc_feature 1..39: note = Description of Artificial Sequence: Synthetic oligonucleotide
  source 1..39: mol_type = other DNA
cagagtgacggaacaggaagcctcgcaggatgggcacag

SEQ ID NO: 946 - DNA, 39 bp, synthetic construct
  misc_feature 1..39: note = Description of Artificial Sequence: Synthetic oligonucleotide
  source 1..39: mol_type = other DNA
cagagtgacggaacaggaagcctcaacggatgggcacag

SEQ ID NO: 947 - DNA, 39 bp, synthetic construct
  misc_feature 1..39: note = Description of Artificial Sequence: Synthetic oligonucleotide
  source 1..39: mol_type = other DNA
cagagtgacggaacaggaagcctccaaggatgggcacag

SEQ ID NO: 948 - DNA, 39 bp, synthetic construct
  misc_feature 1..39: note = Description of Artificial Sequence: Synthetic oligonucleotide
  source 1..39: mol_type = other DNA
cagagtgacggaacaggaagcctcagcggatgggcacag

SEQ ID NO: 949 - DNA, 39 bp, synthetic construct
  misc_feature 1..39: note = Description of Artificial Sequence: Synthetic oligonucleotide
  source 1..39: mol_type = other DNA
cagagtgacggaacaggaagcctcgtcggatgggcacag

SEQ ID NO: 950 - DNA, 39 bp, synthetic construct
  misc_feature 1..39: note = Description of Artificial Sequence: Synthetic oligonucleotide
  source 1..39: mol_type = other DNA
cagagtgacggaacaggaagcacacacggatgggcacag

SEQ ID NO: 951 - DNA, 39 bp, synthetic construct
  misc_feature 1..39: note = Description of Artificial Sequence: Synthetic oligonucleotide
  source 1..39: mol_type = other DNA
cagagtgacggaacaggaagcacaaaaggatgggcacag

SEQ ID NO: 952 - DNA, 39 bp, synthetic construct
  misc_feature 1..39: note = Description of Artificial Sequence: Synthetic oligonucleotide
  source 1..39: mol_type = other DNA
cagagtgacggaacaggaagcacaatgggatgggcacag

SEQ ID NO: 953 - DNA, 39 bp, synthetic construct
  misc_feature 1..39: note = Description of Artificial Sequence: Synthetic oligonucleotide
  source 1..39: mol_type = other DNA
cagagtgacggaacaggaagcacacaaggatgggcacag

SEQ ID NO: 954 - DNA, 39 bp, synthetic construct
  misc_feature 1..39: note = Description of Artificial Sequence: Synthetic oligonucleotide
  source 1..39: mol_type = other DNA
cagagtgacggaacaggaagcacaagcggatgggcacag

SEQ ID NO: 955 - DNA, 39 bp, synthetic construct
  misc_feature 1..39: note = Description of Artificial Sequence: Synthetic oligonucleotide
  source 1..39: mol_type = other DNA
cagagtgacggaacaggaagcacaacaggatgggcacag

SEQ ID NO: 956 - DNA, 39 bp, synthetic construct
  misc_feature 1..39: note = Description of Artificial Sequence: Synthetic oligonucleotide
  source 1..39: mol_type = other DNA
cagagtgacggaacaggaagcgtcatgggatgggcacag

SEQ ID NO: 957 - DNA, 39 bp, synthetic construct
  misc_feature 1..39: note = Description of Artificial Sequence: Synthetic oligonucleotide
  source 1..39: mol_type = other DNA
cagagtgacggaacaggaagcgtcacaggatgggcacag

SEQ ID NO: 958 - DNA, 39 bp, synthetic construct
  misc_feature 1..39: note = Description of Artificial Sequence: Synthetic oligonucleotide
  source 1..39: mol_type = other DNA
cagagtgacggaacaggaacactcgcaggatgggcacag

SEQ ID NO: 959 - DNA, 39 bp, synthetic construct
  misc_feature 1..39: note = Description of Artificial Sequence: Synthetic oligonucleotide
  source 1..39: mol_type = other DNA
cagagtgacggaacaggaacactccacggatgggcacag

SEQ ID NO: 960 - DNA, 39 bp, synthetic construct
  misc_feature 1..39: note = Description of Artificial Sequence: Synthetic oligonucleotide
  source 1..39: mol_type = other DNA
cagagtgacggaacaggaacactcaaaggatgggcacag

SEQ ID NO: 961 - DNA, 39 bp, synthetic construct
  misc_feature 1..39: note = Description of Artificial Sequence: Synthetic oligonucleotide
  source 1..39: mol_type = other DNA
cagagtgacggaacaggaacactcagcggatgggcacag

SEQ ID NO: 962 - DNA, 39 bp, synthetic construct
  misc_feature 1..39: note = Description of Artificial Sequence: Synthetic oligonucleotide
  source 1..39: mol_type = other DNA
cagagtgacggaacaggaacaacactcggatgggcacag

SEQ ID NO: 963 - DNA, 39 bp, synthetic construct
  misc_feature 1..39: note = Description of Artificial Sequence: Synthetic oligonucleotide
  source 1..39: mol_type = other DNA
cagagtgacggaacaggaacaacaatgggatgggcacag

SEQ ID NO: 964 - DNA, 39 bp, synthetic construct
  misc_feature 1..39: note = Description of Artificial Sequence: Synthetic oligonucleotide
  source 1..39: mol_type = other DNA
cagagtgacggaacaggaacaacaacaggatgggcacag

SEQ ID NO: 965 - DNA, 39 bp, synthetic construct
  misc_feature 1..39: note = Description of Artificial Sequence: Synthetic oligonucleotide
  source 1..39: mol_type = other DNA
cagagtgacggaacaggaacaacagtcggatgggcacag

SEQ ID NO: 966 - DNA, 39 bp, synthetic construct
  misc_feature 1..39: note = Description of Artificial Sequence: Synthetic oligonucleotide
  source 1..39: mol_type = other DNA
cagagtgacggaacaggaacaacatacggatgggcacag

SEQ ID NO: 967 - DNA, 39 bp, synthetic construct
  misc_feature 1..39: note = Description of Artificial Sequence: Synthetic oligonucleotide
  source 1..39: mol_type = other DNA
cagagtgacggaacaggaacagtccacggatgggcacag

SEQ ID NO: 968 - DNA, 39 bp, synthetic construct
  misc_feature 1..39: note = Description of Artificial Sequence: Synthetic oligonucleotide
  source 1..39: mol_type = other DNA
cagagtgacggaacaggaacagtccaaggatgggcacag

SEQ ID NO: 969 - DNA, 39 bp, synthetic construct
  misc_feature 1..39: note = Description of Artificial Sequence: Synthetic oligonucleotide
  source 1..39: mol_type = other DNA
cagagtgacggaacaggaacagtcagcggatgggcacag

SEQ ID NO: 970 - DNA, 39 bp, synthetic construct
  misc_feature 1..39: note = Description of Artificial Sequence: Synthetic oligonucleotide
  source 1..39: mol_type = other DNA
cagagtgacggaacaggaacagtcacaggatgggcacag

SEQ ID NO: 971 - DNA, 39 bp, synthetic construct
  misc_feature 1..39: note = Description of Artificial Sequence: Synthetic oligonucleotide
  source 1..39: mol_type = other DNA
cagagtgacggaacacacgcaagactcagcagcgcacag

SEQ ID NO: 972 - DNA, 39 bp, synthetic construct
  misc_feature 1..39: note = Description of Artificial Sequence: Synthetic oligonucleotide
  source 1..39: mol_type = other DNA
cagagtgacggaacacacgcatacatggcaagcgcacag

SEQ ID NO: 973 - DNA, 39 bp, synthetic construct
  misc_feature 1..39: note = Description of Artificial Sequence: Synthetic oligonucleotide
  source 1..39: mol_type = other DNA
cagagtgacggaacacacttcgcaccaccaagagcacag

SEQ ID NO: 974 - DNA, 39 bp, synthetic construct
  misc_feature 1..39: note = Description of Artificial Sequence: Synthetic oligonucleotide
  source 1..39: mol_type = other DNA
cagagtgacggaacacacatccacctcagcagcgcacag

SEQ ID NO: 975 - DNA, 39 bp, synthetic construct
  misc_feature 1..39: note = Description of Artificial Sequence: Synthetic oligonucleotide
  source 1..39: mol_type = other DNA
cagagtgacggaacacacatcagagcactcagcgcacag

SEQ ID NO: 976 - DNA, 39 bp, synthetic construct
  misc_feature 1..39: note = Description of Artificial Sequence: Synthetic oligonucleotide
  source 1..39: mol_type = other DNA
cagagtgacggaacacacatcagactcgcaagcgcacag

SEQ ID NO: 977 - DNA, 39 bp, synthetic construct
  misc_feature 1..39: note = Description of Artificial Sequence: Synthetic oligonucleotide
  source 1..39: mol_type = other DNA
cagagtgacggaacacacctccaaccattcagagcacag

SEQ ID NO: 978 - DNA, 39 bp, synthetic construct
  misc_feature 1..39: note = Description of Artificial Sequence: Synthetic oligonucleotide
  source 1..39: mol_type = other DNA
cagagtgacggaacacacagcttctacgacgcagcacag

SEQ ID NO: 979 - DNA, 39 bp, synthetic construct
  misc_feature 1..39: note = Description of Artificial Sequence: Synthetic oligonucleotide
  source 1..39: mol_type = other DNA
cagagtgacggaacacacagcacaacaggatgggcacag

SEQ ID NO: 980 - DNA, 39 bp, synthetic construct
  misc_feature 1..39: note = Description of Artificial Sequence: Synthetic oligonucleotide
  source 1..39: mol_type = other DNA
cagagtgacggaacacacacaagaacaggatgggcacag

SEQ ID NO: 981 - DNA, 39 bp, synthetic construct
  misc_feature 1..39: note = Description of Artificial Sequence: Synthetic oligonucleotide
  source 1..39: mol_type = other DNA
cagagtgacggaacacacgtcagagcactcagcgcacag

SEQ ID NO: 982 - DNA, 39 bp, synthetic construct
  misc_feature 1..39: note = Description of Artificial Sequence: Synthetic oligonucleotide
  source 1..39: mol_type = other DNA
cagagtgacggaacacacgtctacatggcaagcgcacag

SEQ ID NO: 983 - DNA, 39 bp, synthetic construct
  misc_feature 1..39: note = Description of Artificial Sequence: Synthetic oligonucleotide
  source 1..39: mol_type = other DNA
cagagtgacggaacacacgtctacatgagcagcgcacag

SEQ ID NO: 984 - DNA, 39 bp, synthetic construct
  misc_feature 1..39: note = Description of Artificial Sequence: Synthetic oligonucleotide
  source 1..39: mol_type = other DNA
cagagtgacggaacaatcgcactcccattcaaagcacag

SEQ ID NO: 985 - DNA, 39 bp, synthetic construct
  misc_feature 1..39: note = Description of Artificial Sequence: Synthetic oligonucleotide
  source 1..39: mol_type = other DNA
cagagtgacggaacaatcgcactcccattcagagcacag

SEQ ID NO: 986 - DNA, 39 bp, synthetic construct
  misc_feature 1..39: note = Description of Artificial Sequence: Synthetic oligonucleotide
  source 1..39: mol_type = other DNA
cagagtgacggaacaatcgcaacaagatacgtcgcacag

SEQ ID NO: 987 - DNA, 39 bp, synthetic construct
  misc_feature 1..39: note = Description of Artificial Sequence: Synthetic oligonucleotide
  source 1..39: mol_type = other DNA
cagagtgacggaacaatcgaaagaccattcagagcacag

SEQ ID NO: 988 - DNA, 39 bp, synthetic construct
  misc_feature 1..39: note = Description of Artificial Sequence: Synthetic oligonucleotide
  source 1..39: mol_type = other DNA
cagagtgacggaacaatcggatacgcatacgtcgcacag

SEQ ID NO: 989 - DNA, 39 bp, synthetic construct
  misc_feature 1..39: note = Description of Artificial Sequence: Synthetic oligonucleotide
  source 1..39: mol_type = other DNA
cagagtgacggaacaatccaagcaccattcaaagcacag

SEQ ID NO: 990 - DNA, 39 bp, synthetic construct
  misc_feature 1..39: note = Description of Artificial Sequence: Synthetic oligonucleotide
  source 1..39: mol_type = other DNA
cagagtgacggaacaatcagactcccattcaaagcacag

SEQ ID NO: 991 - DNA, 39 bp, synthetic construct
  misc_feature 1..39: note = Description of Artificial Sequence: Synthetic oligonucleotide
  source 1..39: mol_type = other DNA
cagagtgacggaacaatcagcaaagaagtcggagcacag

SEQ ID NO: 992 - DNA, 39 bp, synthetic construct
  misc_feature 1..39: note = Description of Artificial Sequence: Synthetic oligonucleotide
  source 1..39: mol_type = other DNA
cagagtgacggaacaatcagccaaccattcaaagcacag

SEQ ID NO: 993 - DNA, 39 bp, synthetic construct
  misc_feature 1..39: note = Description of Artificial Sequence: Synthetic oligonucleotide
  source 1..39: mol_type = other DNA
cagagtgacggaacaaaaatccaactcagcagcgcacag

SEQ ID NO: 994 - DNA, 39 bp, synthetic construct
  misc_feature 1..39: note = Description of Artificial Sequence: Synthetic oligonucleotide
  source 1..39: mol_type = other DNA
cagagtgacggaacaaaaatcagactcagcagcgcacag

SEQ ID NO: 995 - DNA, 39 bp, synthetic construct
  misc_feature 1..39: note = Description of Artificial Sequence: Synthetic oligonucleotide
  source 1..39: mol_type = other DNA
cagagtgacggaacaaaactcatgctcagcagcgcacag

SEQ ID NO: 996 - DNA, 39 bp, synthetic construct
  misc_feature 1..39: note = Description of Artificial Sequence: Synthetic oligonucleotide
  source 1..39: mol_type = other DNA
cagagtgacggaacaaaactcagactcagcagcgcacag

SEQ ID NO: 997 - DNA, 39 bp, synthetic construct
  misc_feature 1..39: note = Description of Artificial Sequence: Synthetic oligonucleotide
  source 1..39: mol_type = other DNA
cagagtgacggaacaaaaatggtcctccaactcgcacag

SEQ ID NO: 998 - DNA, 39 bp, synthetic construct
  misc_feature 1..39: note = Description of Artificial Sequence: Synthetic oligonucleotide
  source 1..39: mol_type = other DNA
cagagtgacggaacaaaaagcctcgtccaactcgcacag

SEQ ID NO: 999 - DNA, 39 bp, synthetic construct
  misc_feature 1..39: note = Description of Artificial Sequence: Synthetic oligonucleotide
  source 1..39: mol_type = other DNA
cagagtgacggaacaaaagtcctcgtccaactcgcacag

SEQ ID NO: 1000 - DNA, 39 bp, synthetic construct
  misc_feature 1..39: note = Description of Artificial Sequence: Synthetic oligonucleotide
  source 1..39: mol_type = other DNA
cagagtgacggaacactcgcagcaccattcaaagcacag

SEQ ID NO: 1001 - DNA, 39 bp, synthetic construct
  misc_feature 1..39: note = Description of Artificial Sequence: Synthetic oligonucleotide
  source 1..39: mol_type = other DNA
cagagtgacggaacactcgcagtcaacttcaaagcacag

SEQ ID NO: 1002 - DNA, 39 bp, synthetic construct
  misc_feature 1..39: note = Description of Artificial Sequence: Synthetic oligonucleotide
  source 1..39: mol_type = other DNA
cagagtgacggaacactcgcagtcccattcaaagcacag

SEQ ID NO: 1003 - DNA, 39 bp, synthetic construct
  misc_feature 1..39: note = Description of Artificial Sequence: Synthetic oligonucleotide
  source 1..39: mol_type = other DNA
cagagtgacggaacactcgcatacccattcaaagcacag

SEQ ID NO: 1004 - DNA, 39 bp, synthetic construct
  misc_feature 1..39: note = Description of Artificial Sequence: Synthetic oligonucleotide
  source 1..39: mol_type = other DNA
cagagtgacggaacactcgaaagaccattcagagcacag

SEQ ID NO: 1005 - DNA, 39 bp, synthetic construct
  misc_feature 1..39: note = Description of Artificial Sequence: Synthetic oligonucleotide
  source 1..39: mol_type = other DNA
cagagtgacggaacactcgaagtccacttcaaagcacag

SEQ ID NO: 1006 - DNA, 39 bp, synthetic construct
  misc_feature 1..39: note = Description of Artificial Sequence: Synthetic oligonucleotide
  source 1..39: mol_type = other DNA
cagagtgacggaacactcctcagactcagcagcgcacag

SEQ ID NO: 1007 - DNA, 39 bp, synthetic construct
  misc_feature 1..39: note = Description of Artificial Sequence: Synthetic oligonucleotide
  source 1..39: mol_type = other DNA
cagagtgacggaacactcaacaacccattcagagcacag

SEQ ID NO: 1008 - DNA, 39 bp, synthetic construct
  misc_feature 1..39: note = Description of Artificial Sequence: Synthetic oligonucleotide
  source 1..39: mol_type = other DNA
cagagtgacggaacactccaacaaccattcagagcacag

SEQ ID NO: 1009 - DNA, 39 bp, synthetic construct
  misc_feature 1..39: note = Description of Artificial Sequence: Synthetic oligonucleotide
  source 1..39: mol_type = other DNA
cagagtgacggaacactcagccaaccattcagagcacag

SEQ ID NO: 1010 - DNA, 39 bp, synthetic construct
  misc_feature 1..39: note = Description of Artificial Sequence: Synthetic oligonucleotide
  source 1..39: mol_type = other DNA
cagagtgacggaacactcagcagaacactctgggcacag

SEQ ID NO: 1011 - DNA, 39 bp, synthetic construct
  misc_feature 1..39: note = Description of Artificial Sequence: Synthetic oligonucleotide
  source 1..39: mol_type = other DNA
cagagtgacggaacactcagcagcccattcagagcacag

SEQ ID NO: 1012 - DNA, 39 bp, synthetic construct
  misc_feature 1..39: note = Description of Artificial Sequence: Synthetic oligonucleotide
  source 1..39: mol_type = other DNA
cagagtgacggaacactcacagtcccattcagagcacag

SEQ ID NO: 1013 - DNA, 39 bp, synthetic construct
  misc_feature 1..39: note = Description of Artificial Sequence: Synthetic oligonucleotide
  source 1..39: mol_type = other DNA
cagagtgacggaacactcgtcgcaccattcagagcacag

SEQ ID NO: 1014 - DNA, 39 bp, synthetic construct
  misc_feature 1..39: note = Description of Artificial Sequence: Synthetic oligonucleotide
  source 1..39: mol_type = other DNA
cagagtgacggaacaatggacaaaccattcagagcacag

SEQ ID NO: 1015 - DNA, 39 bp, synthetic construct
  misc_feature 1..39: note = Description of Artificial Sequence: Synthetic oligonucleotide
  source 1..39: mol_type = other DNA
cagagtgacggaacaatggacagaccattcaaagcacag

SEQ ID NO: 1016 - DNA, 39 bp, synthetic construct
  misc_feature 1..39: note = Description of Artificial Sequence: Synthetic oligonucleotide
  source 1..39: mol_type = other DNA
cagagtgacggaacaatgctcagactcagcagcgcacag

SEQ ID NO: 1017 - DNA, 39 bp, synthetic construct
  misc_feature 1..39: note = Description of Artificial Sequence: Synthetic oligonucleotide
  source 1..39: mol_type = other DNA
cagagtgacggaacaatgcaactcacaggatgggcacag

SEQ ID NO: 1018 - DNA, 39 bp, synthetic construct
  misc_feature 1..39: note = Description of Artificial Sequence: Synthetic oligonucleotide
  source 1..39: mol_type = other DNA
cagagtgacggaacaaacggactcaaaggatgggcacag

SEQ ID NO: 1019 - DNA, 39 bp, synthetic construct
  misc_feature 1..39: note = Description of Artificial Sequence: Synthetic oligonucleotide
  source 1..39: mol_type = other DNA
cagagtgacggaacaaacagcatcagcggatgggcacag

SEQ ID NO: 1020 - DNA, 39 bp, synthetic construct
  misc_feature 1..39: note = Description of Artificial Sequence: Synthetic oligonucleotide
  source 1..39: mol_type = other DNA
cagagtgacggaacaaacagcctcagcggatgggcacag

SEQ ID NO: 1021 - DNA, 39 bp, synthetic construct
  misc_feature 1..39: note = Description of Artificial Sequence: Synthetic oligonucleotide
  source 1..39: mol_type = other DNA
cagagtgacggaacaaacagcacaacaggatgggcacag

SEQ ID NO: 1022 - DNA, 39 bp, synthetic construct
  misc_feature 1..39: note = Description of Artificial Sequence: Synthetic oligonucleotide
  source 1..39: mol_type = other DNA
cagagtgacggaacaaacagcgtcacaggatgggcacag

SEQ ID NO: 1023 - DNA, 39 bp, synthetic construct
  misc_feature 1..39: note = Description of Artificial Sequence: Synthetic oligonucleotide
  source 1..39: mol_type = other DNA
cagagtgacggaacaaacacaatcaacggatgggcacag

SEQ ID NO: 1024 - DNA, 39 bp, synthetic construct
  misc_feature 1..39: note = Description of Artificial Sequence: Synthetic oligonucleotide
  source 1..39: mol_type = other DNA
cagagtgacggaacaaacacactcggaggatgggcacag

SEQ ID NO: 1025 - DNA, 39 bp, synthetic construct
  misc_feature 1..39: note = Description of Artificial Sequence: Synthetic oligonucleotide
  source 1..39: mol_type = other DNA
cagagtgacggaacaaacacaacacacggatgggcacag

SEQ ID NO: 1026 - DNA, 39 bp, synthetic construct
  misc_feature 1..39: note = Description of Artificial Sequence: Synthetic oligonucleotide
  source 1..39: mol_type = other DNA
cagagtgacggaacaaactacagactcagcagcgcacag

SEQ ID NO: 1027 - DNA, 39 bp, synthetic construct
  misc_feature 1..39: note = Description of Artificial Sequence: Synthetic oligonucleotide
  source 1..39: mol_type = other DNA
cagagtgacggaacacaagcactcagcggatgggcacag

SEQ ID NO: 1028 - DNA, 39 bp, synthetic construct
  misc_feature 1..39: note = Description of Artificial Sequence: Synthetic oligonucleotide
  source 1..39: mol_type = other DNA
cagagtgacggaacacaattcagactcagcagcgcacag

SEQ ID NO: 1029 - DNA, 39 bp, synthetic construct
  misc_feature 1..39: note = Description of Artificial Sequence: Synthetic oligonucleotide
  source 1..39: mol_type = other DNA
cagagtgacggaacacaattcagcccaccaagagcacag

SEQ ID NO: 1030 - DNA, 39 bp, synthetic construct
  misc_feature 1..39: note = Description of Artificial Sequence: Synthetic oligonucleotide
  source 1..39: mol_type = other DNA
cagagtgacggaacacaaggactcaaaggatgggcacag

SEQ ID NO: 1031 - DNA, 39 bp, synthetic construct
  misc_feature 1..39: note = Description of Artificial Sequence: Synthetic oligonucleotide
  source 1..39: mol_type = other DNA
cagagtgacggaacacaaacaacaagcggatgggcacag

SEQ ID NO: 1032 - DNA, 39 bp, synthetic construct
  misc_feature 1..39: note = Description of Artificial Sequence: Synthetic oligonucleotide
  source 1..39: mol_type = other DNA
cagagtgacggaacaagagcactcacaggatgggcacag

SEQ ID NO: 1033 - DNA, 39 bp, synthetic construct
  misc_feature 1..39: note = Description of Artificial Sequence: Synthetic oligonucleotide
  source 1..39: mol_type = other DNA
cagagtgacggaacaagattcagcctcagcagcgcacag

SEQ ID NO: 1034 - DNA, 39 bp, synthetic construct
  misc_feature 1..39: note = Description of Artificial Sequence: Synthetic oligonucleotide
  source 1..39: mol_type = other DNA
cagagtgacggaacaagaggactcagcggatgggcacag

SEQ ID NO: 1035 - DNA, 39 bp, synthetic construct
  misc_feature 1..39: note = Description of Artificial Sequence: Synthetic oligonucleotide
  source 1..39: mol_type = other DNA
cagagtgacggaacaagaatcggactcagcagcgcacag

SEQ ID NO: 1036 - DNA, 39 bp, synthetic construct
  misc_feature 1..39: note = Description of Artificial Sequence: Synthetic oligonucleotide
  source 1..39: mol_type = other DNA
cagagtgacggaacaagactccacctcgcaagcgcacag

SEQ ID NO: 1037 - DNA, 39 bp, synthetic construct
  misc_feature 1..39: note = Description of Artificial Sequence: Synthetic oligonucleotide
  source 1..39: mol_type = other DNA
cagagtgacggaacaagactccacctcagcagcgcacag

SEQ ID NO: 1038 - DNA, 39 bp, synthetic construct
  misc_feature 1..39: note = Description of Artificial Sequence: Synthetic oligonucleotide
  source 1..39: mol_type = other DNA
cagagtgacggaacaagactcctcctcagcagcgcacag

SEQ ID NO: 1039 - DNA, 39 bp, synthetic construct
  misc_feature 1..39: note = Description of Artificial Sequence: Synthetic oligonucleotide
  source 1..39: mol_type = other DNA
cagagtgacggaacaagactcatgctcagcagcgcacag

SEQ ID NO: 1040 - DNA, 39 bp, synthetic construct
  misc_feature 1..39: note = Description of Artificial Sequence: Synthetic oligonucleotide
  source 1..39: mol_type = other DNA
cagagtgacggaacaagactcaacctcagcagcgcacag

SEQ ID NO: 1041 - DNA, 39 bp, synthetic construct
  misc_feature 1..39: note = Description of Artificial Sequence: Synthetic oligonucleotide
  source 1..39: mol_type = other DNA
cagagtgacggaacaagaatggtcgtccaactcgcacag

SEQ ID NO: 1042 - DNA, 39 bp, synthetic construct
  misc_feature 1..39: note = Description of Artificial Sequence: Synthetic oligonucleotide
  source 1..39: mol_type = other DNA
cagagtgacggaacaagaaacatgtacgaaggagcacag

SEQ ID NO: 1043 - DNA, 39 bp, synthetic construct
  misc_feature 1..39: note = Description of Artificial Sequence: Synthetic oligonucleotide
  source 1..39: mol_type = other DNA
cagagtgacggaacaagaagcatcacaggatgggcacag

SEQ ID NO: 1044 - DNA, 39 bp, synthetic construct
  misc_feature 1..39: note = Description of Artificial Sequence: Synthetic oligonucleotide
  source 1..39: mol_type = other DNA
cagagtgacggaacaagaagcctccacggatgggcacag

SEQ ID NO: 1045 - DNA, 39 bp, synthetic construct
  misc_feature 1..39: note = Description of Artificial Sequence: Synthetic oligonucleotide
  source 1..39: mol_type = other DNA
cagagtgacggaacaagaagcacaacaggatgggcacag

SEQ ID NO: 1046 - DNA, 39 bp, synthetic construct
  misc_feature 1..39: note = Description of Artificial Sequence: Synthetic oligonucleotide
  source 1..39: mol_type = other DNA
cagagtgacggaacaagaacaacaacaggatgggcacag

SEQ ID NO: 1047 - DNA, 39 bp, synthetic construct
  misc_feature 1..39: note = Description of Artificial Sequence: Synthetic oligonucleotide
  source 1..39: mol_type = other DNA
cagagtgacggaacaagaacagtcacaggatgggcacag

SEQ ID NO: 1048 - DNA, 39 bp, synthetic construct
  misc_feature 1..39: note = Description of Artificial Sequence: Synthetic oligonucleotide
  source 1..39: mol_type = other DNA
cagagtgacggaacaagaacagtcgtccaactcgcacag

SEQ ID NO: 1049 - DNA, 39 bp, synthetic construct
  misc_feature 1..39: note = Description of Artificial Sequence: Synthetic oligonucleotide
  source 1..39: mol_type = other DNA
cagagtgacggaacaagagtccacctcagcagcgcacag

SEQ ID NO: 1050 - DNA, 39 bp, synthetic construct
  misc_feature 1..39: note = Description of Artificial Sequence: Synthetic oligonucleotide
  source 1..39: mol_type = other DNA
cagagtgacggaacaagcttcccatacgcaagagcacag

SEQ ID NO: 1051 - DNA, 39 bp, synthetic construct
  misc_feature 1..39: note = Description of Artificial Sequence: Synthetic oligonucleotide
  source 1..39: mol_type = other DNA
cagagtgacggaacaagcttcacaccaccaaaagcacag

SEQ ID NO: 1052 - DNA, 39 bp, synthetic construct
  misc_feature 1..39: note = Description of Artificial Sequence: Synthetic oligonucleotide
  source 1..39: mol_type = other DNA
cagagtgacggaacaagcttcacaccaccaagagcacag

SEQ ID NO: 1053 - DNA, 39 bp, synthetic construct
  misc_feature 1..39: note = Description of Artificial Sequence: Synthetic oligonucleotide
  source 1..39: mol_type = other DNA
cagagtgacggaacaagcggactccacggatgggcacag

SEQ ID NO: 1054 - DNA, 39 bp, synthetic construct
  misc_feature 1..39: note = Description of Artificial Sequence: Synthetic oligonucleotide
  source 1..39: mol_type = other DNA
cagagtgacggaacaagcggactcaaaggatgggcacag

SEQ ID NO: 1055 - DNA, 39 bp, synthetic construct
  misc_feature 1..39: note = Description of Artificial Sequence: Synthetic oligonucleotide
  source 1..39: mol_type = other DNA
cagagtgacggaacaagcatccacctcagcagcgcacag

SEQ ID NO: 1056 - DNA, 39 bp, synthetic construct
  misc_feature 1..39: note = Description of Artificial Sequence: Synthetic oligonucleotide
  source 1..39: mol_type = other DNA
cagagtgacggaacaagcatcatgctcagcagcgcacag

SEQ ID NO: 1057 - DNA, 39 bp, synthetic construct
  misc_feature 1..39: note = Description of Artificial Sequence: Synthetic oligonucleotide
  source 1..39: mol_type = other DNA
cagagtgacggaacaagcctcagactcagcagcgcacag

SEQ ID NO: 1058 - DNA, 39 bp, synthetic construct
  misc_feature 1..39: note = Description of Artificial Sequence: Synthetic oligonucleotide
  source 1..39: mol_type = other DNA
cagagtgacggaacaagcaactacggagcaagagcacag

SEQ ID NO: 1059 - DNA, 39 bp, synthetic construct
  misc_feature 1..39: note = Description of Artificial Sequence: Synthetic oligonucleotide
  source 1..39: mol_type = other DNA
cagagtgacggaacaagcagctactacgacgcagcacag

SEQ ID NO: 1060 - DNA, 39 bp, synthetic construct
  misc_feature 1..39: note = Description of Artificial Sequence: Synthetic oligonucleotide
  source 1..39: mol_type = other DNA
cagagtgacggaacaagcagctactacgacagcgcacag

SEQ ID NO: 1061 - DNA, 39 bp, synthetic construct
  misc_feature 1..39: note = Description of Artificial Sequence: Synthetic oligonucleotide
  source 1..39: mol_type = other DNA
cagagtgacggaacaagcacaatcagcggatgggcacag

SEQ ID NO: 1062 - DNA, 39 bp, synthetic construct
  misc_feature 1..39: note = Description of Artificial Sequence: Synthetic oligonucleotide
  source 1..39: mol_type = other DNA
cagagtgacggaacaagcacaatcacaggatgggcacag

SEQ ID NO: 1063 - DNA, 39 bp, synthetic construct
  misc_feature 1..39: note = Description of Artificial Sequence: Synthetic oligonucleotide
  source 1..39: mol_type = other DNA
cagagtgacggaacaagcacactccacggatgggcacag

SEQ ID NO: 1064 - DNA, 39 bp, synthetic construct
  misc_feature 1..39: note = Description of Artificial Sequence: Synthetic oligonucleotide
  source 1..39: mol_type = other DNA
cagagtgacggaacaagcacactcagaggatgggcacag

SEQ ID NO: 1065 - DNA, 39 bp, synthetic construct
  misc_feature 1..39: note = Description of Artificial Sequence: Synthetic oligonucleotide
  source 1..39: mol_type = other DNA
cagagtgacggaacaagcacactcagcggatgggcacag

SEQ ID NO: 1066 - DNA, 39 bp, synthetic construct
  misc_feature 1..39: note = Description of Artificial Sequence: Synthetic oligonucleotide
  source 1..39: mol_type = other DNA
cagagtgacggaacaagctacgtcccaccaaaagcacag

SEQ ID NO: 1067 - DNA, 39 bp, synthetic construct
  misc_feature 1..39: note = Description of Artificial Sequence: Synthetic oligonucleotide
  source 1..39: mol_type = other DNA
cagagtgacggaacaagctacgtcccaccaagagcacag

SEQ ID NO: 1068 - DNA, 39 bp, synthetic construct
  misc_feature 1..39: note = Description of Artificial Sequence: Synthetic oligonucleotide
  source 1..39: mol_type = other DNA
cagagtgacggaacaacagcaacatactacaaagcacag

SEQ ID NO: 1069 - DNA, 39 bp, synthetic construct
  misc_feature 1..39: note = Description of Artificial Sequence: Synthetic oligonucleotide
  source 1..39: mol_type = other DNA
cagagtgacggaacaacattcacaccaccaagagcacag

SEQ ID NO: 1070 - DNA, 39 bp, synthetic construct
  misc_feature 1..39: note = Description of Artificial Sequence: Synthetic oligonucleotide
  source 1..39: mol_type = other DNA
cagagtgacggaacaacactcgcaccattcagagcacag

SEQ ID NO: 1071 - DNA, 39 bp, synthetic construct
  misc_feature 1..39: note = Description of Artificial Sequence: Synthetic oligonucleotide
  source 1..39: mol_type = other DNA
cagagtgacggaacaacactcgtcccaccaagagcacag

SEQ ID NO: 1072 - DNA, 39 bp, synthetic construct
  misc_feature 1..39: note = Description of Artificial Sequence: Synthetic oligonucleotide
  source 1..39: mol_type = other DNA
cagagtgacggaacaacaagcaaaacactctgggcacag

SEQ ID NO: 1073 - DNA, 39 bp, synthetic construct
  misc_feature 1..39: note = Description of Artificial Sequence: Synthetic oligonucleotide
  source 1..39: mol_type = other DNA
cagagtgacggaacaacaagcagaacactctgggcacag

SEQ ID NO: 1074 - DNA, 39 bp, synthetic construct
  misc_feature 1..39: note = Description of Artificial Sequence: Synthetic oligonucleotide
  source 1..39: mol_type = other DNA
cagagtgacggaacaacaacaagaagcctctacgcacag

SEQ ID NO: 1075 - DNA, 39 bp, synthetic construct
  misc_feature 1..39: note = Description of Artificial Sequence: Synthetic oligonucleotide
  source 1..39: mol_type = other DNA
cagagtgacggaacaacaacaacaacaggatgggcacag

SEQ ID NO: 1076 - DNA, 39 bp, synthetic construct
  misc_feature 1..39: note = Description of Artificial Sequence: Synthetic oligonucleotide
  source 1..39: mol_type = other DNA
cagagtgacggaacaacaacatacggagcaagagcacag

SEQ ID NO: 1077 - DNA, 39 bp, synthetic construct
  misc_feature 1..39: note = Description of Artificial Sequence: Synthetic oligonucleotide
  source 1..39: mol_type = other DNA
cagagtgacggaacaacatggacaccaccaagagcacag

SEQ ID NO: 1078 - DNA, 39 bp, synthetic construct
  misc_feature 1..39: note = Description of Artificial Sequence: Synthetic oligonucleotide
  source 1..39: mol_type = other DNA
cagagtgacggaacaacatacatgctcagcagcgcacag

SEQ ID NO: 1079 - DNA, 39 bp, synthetic construct
  misc_feature 1..39: note = Description of Artificial Sequence: Synthetic oligonucleotide
  source 1..39: mol_type = other DNA
cagagtgacggaacaacatacgtcccaccaagagcacag

SEQ ID NO: 1080 - DNA, 39 bp, synthetic construct
  misc_feature 1..39: note = Description of Artificial Sequence: Synthetic oligonucleotide
  source 1..39: mol_type = other DNA
cagagtgacggaacagtcgcaaacccattcagagcacag

SEQ ID NO: 1081 - DNA, 39 bp, synthetic construct
  misc_feature 1..39: note = Description of Artificial Sequence: Synthetic oligonucleotide
  source 1..39: mol_type = other DNA
cagagtgacggaacagtcgacagaccattcaaagcacag

SEQ ID NO: 1082 - DNA, 39 bp, synthetic construct
  misc_feature 1..39: note = Description of Artificial Sequence: Synthetic oligonucleotide
  source 1..39: mol_type = other DNA
cagagtgacggaacagtcatccacctcagcagcgcacag

SEQ ID NO: 1083 - DNA, 39 bp, synthetic construct
  misc_feature 1..39: note = Description of Artificial Sequence: Synthetic oligonucleotide
  source 1..39: mol_type = other DNA
cagagtgacggaacagtcatcctcctcagcagcgcacag

SEQ ID NO: 1084 - DNA, 39 bp, synthetic construct
  misc_feature 1..39: note = Description of Artificial Sequence: Synthetic oligonucleotide
  source 1..39: mol_type = other DNA
cagagtgacggaacagtcatcatgctcagcagcgcacag

SEQ ID NO: 1085 - DNA, 39 bp, synthetic construct
  misc_feature 1..39: note = Description of Artificial Sequence: Synthetic oligonucleotide
  source 1..39: mol_type = other DNA
cagagtgacggaacagtcctccacctcagcagcgcacag

SEQ ID NO: 1086 - DNA, 39 bp, synthetic construct
  misc_feature 1..39: note = Description of Artificial Sequence: Synthetic oligonucleotide
  source 1..39: mol_type = other DNA
cagagtgacggaacagtcctcatgctcagcagcgcacag

SEQ ID NO: 1087 - DNA, 39 bp, synthetic construct
  misc_feature 1..39: note = Description of Artificial Sequence: Synthetic oligonucleotide
  source 1..39: mol_type = other DNA
cagagtgacggaacagtcctcgtcccattcagagcacag

SEQ ID NO: 1088 - DNA, 39 bp, synthetic construct
  misc_feature 1..39: note = Description of Artificial Sequence: Synthetic oligonucleotide
  source 1..39: mol_type = other DNA
cagagtgacggaacagtcccatacctcgcaagcgcacag

SEQ ID NO: 1089 - DNA, 39 bp, synthetic construct
  misc_feature 1..39: note = Description of Artificial Sequence: Synthetic oligonucleotide
  source 1..39: mol_type = other DNA
cagagtgacggaacagtcccatacctcagcagcgcacag

SEQ ID NO: 1090 - DNA, 39 bp, synthetic construct
  misc_feature 1..39: note = Description of Artificial Sequence: Synthetic oligonucleotide
  source 1..39: mol_type = other DNA
cagagtgacggaacagtcagagtcccattcagagcacag

SEQ ID NO: 1091 - DNA, 39 bp, synthetic construct
  misc_feature 1..39: note = Description of Artificial Sequence: Synthetic oligonucleotide
  source 1..39: mol_type = other DNA
cagagtgacggaacagtcagcatgccattcaaagcacag

SEQ ID NO: 1092 - DNA, 39 bp, synthetic construct
  misc_feature 1..39: note = Description of Artificial Sequence: Synthetic oligonucleotide
  source 1..39: mol_type = other DNA
cagagtgacggaacagtcagcaacccattcagagcacag

SEQ ID NO: 1093 - DNA, 39 bp, synthetic construct
  misc_feature 1..39: note = Description of Artificial Sequence: Synthetic oligonucleotide
  source 1..39: mol_type = other DNA
cagagtgacggaacagtcagcacaagatgggtcgcacag

SEQ ID NO: 1094 - DNA, 39 bp, synthetic construct
  misc_feature 1..39: note = Description of Artificial Sequence: Synthetic oligonucleotide
  source 1..39: mol_type = other DNA
cagagtgacggaacagtcacaacaacaggatgggcacag

SEQ ID NO: 1095 - DNA, 39 bp, synthetic construct
  misc_feature 1..39: note = Description of Artificial Sequence: Synthetic oligonucleotide
  source 1..39: mol_type = other DNA
cagagtgacggaacagtcacagtcacaggatgggcacag

SEQ ID NO: 1096 - DNA, 39 bp, synthetic construct
  misc_feature 1..39: note = Description of Artificial Sequence: Synthetic oligonucleotide
  source 1..39: mol_type = other DNA
cagagtgacggaacagtctgggtcccaccaagagcacag

SEQ ID NO: 1097 - DNA, 39 bp, synthetic construct
  misc_feature 1..39: note = Description of Artificial Sequence: Synthetic oligonucleotide
  source 1..39: mol_type = other DNA
cagagtgacggaacagtctacagactcagcagcgcacag

SEQ ID NO: 1098 - DNA, 39 bp, synthetic construct
  misc_feature 1..39: note = Description of Artificial Sequence: Synthetic oligonucleotide
  source 1..39: mol_type = other DNA
cagagtgacggaacatacgcaagactcagcagcgcacag

SEQ ID NO: 1099 - DNA, 39 bp, synthetic construct
  misc_feature 1..39: note = Description of Artificial Sequence: Synthetic oligonucleotide
  source 1..39: mol_type = other DNA
cagagtgacggaacatacggaaacaaactctgggcacag

SEQ ID NO: 1100 - DNA, 39 bp, synthetic construct
  misc_feature 1..39: note = Description of Artificial Sequence: Synthetic oligonucleotide
  source 1..39: mol_type = other DNA
cagagtgacggaacatacatccacctcagcagcgcacag

SEQ ID NO: 1101 - DNA, 39 bp, synthetic construct
  misc_feature 1..39: note = Description of Artificial Sequence: Synthetic oligonucleotide
  source 1..39: mol_type = other DNA
cagagtgacggaacatacagcacaagcggatgggcacag

SEQ ID NO: 1102 - DNA, 39 bp, synthetic construct
  misc_feature 1..39: note = Description of Artificial Sequence: Synthetic oligonucleotide
  source 1..39: mol_type = other DNA
cagagtgacggagtccacccaggactcagcagcgcacag

SEQ ID NO: 1103 - DNA, 39 bp, synthetic construct
  misc_feature 1..39: note = Description of Artificial Sequence: Synthetic oligonucleotide
  source 1..39: mol_type = other DNA
cagagtgacggagtcgtcgcactcctcgcaagcgcacag

SEQ ID NO: 1104 - DNA, 39 bp, synthetic construct
  misc_feature 1..39: note = Description of Artificial Sequence: Synthetic oligonucleotide
  source 1..39: mol_type = other DNA
cagagtgacggatacgtcggagtcggaagcctcgcacag

SEQ ID NO: 1105 - DNA, 27 bp, synthetic construct
  misc_feature 1..27: note = Description of Artificial Sequence: Synthetic oligonucleotide
  source 1..27: mol_type = other DNA
gcccaaggttcgtggaatccgccggcg

SEQ ID NO: 1106 - DNA, 27 bp, synthetic construct
  misc_feature 1..27: note = Description of Artificial Sequence: Synthetic oligonucleotide
  source 1..27: mol_type = other DNA
gcccaaaatggtaatccggggcggtgg

SEQ ID NO: 1107 - DNA, 27 bp, synthetic construct
  misc_feature 1..27: note = Description of Artificial Sequence: Synthetic oligonucleotide
  source 1..27: mol_type = other DNA
gcccaaacgactgagaagccgtggctg

SEQ ID NO: 1108 - DNA, 27 bp, synthetic construct
  misc_feature 1..27: note = Description of Artificial Sequence: Synthetic oligonucleotide
  source 1..27: mol_type = other DNA
gatggcacggcggatcgtccttttcgg

SEQ ID NO: 1109 - DNA, 27 bp, synthetic construct
  misc_feature 1..27: note = Description of Artificial Sequence: Synthetic oligonucleotide
  source 1..27: mol_type = other DNA
gatggcaccatttcgcagccttttaag

SEQ ID NO: 1110 - DNA, 27 bp, synthetic construct
  misc_feature 1..27: note = Description of Artificial Sequence: Synthetic oligonucleotide
  source 1..27: mol_type = other DNA
gatggcaccttggctgctccttttaag

SEQ ID NO: 1111 - DNA, 27 bp, synthetic construct
  misc_feature 1..27: note = Description of Artificial Sequence: Synthetic oligonucleotide
  source 1..27: mol_type = other DNA
gatggcaccttgcagcagccgtttcgg

SEQ ID NO: 1112 - DNA, 27 bp, synthetic construct
  misc_feature 1..27: note = Description of Artificial Sequence: Synthetic oligonucleotide
  source 1..27: mol_type = other DNA
gatggcaccctgtctcagccttttagg

SEQ ID NO: 1113 - DNA, 27 bp, synthetic construct
  misc_feature 1..27: note = Description of Artificial Sequence: Synthetic oligonucleotide
  source 1..27: mol_type = other DNA
gatggcaccatggataggccgtttaag

SEQ ID NO: 1114 - DNA, 27 bp, synthetic construct
  misc_feature 1..27: note = Description of Artificial Sequence: Synthetic oligonucleotide
  source 1..27: mol_type = other DNA
gatggcacccgtactacgacgggttgg

SEQ ID NO: 1115 - DNA, 27 bp, synthetic construct
  misc_feature 1..27: note = Description of Artificial Sequence: Synthetic oligonucleotide
  source 1..27: mol_type = other DNA
gatggcaccacttttactcctcctcgg

SEQ ID NO: 1116 - DNA, 27 bp, synthetic construct
  misc_feature 1..27: note = Description of Artificial Sequence: Synthetic oligonucleotide
  source 1..27: mol_type = other DNA
gatggcaccacgtatgttcctccgcgg

SEQ ID NO: 1117 - DNA, 27 bp, synthetic construct
  misc_feature 1..27: note = Description of Artificial Sequence: Synthetic oligonucleotide
  source 1..27: mol_type = other DNA
gcccaaggggagaatccgggtaggtgg

SEQ ID NO: 1118 - DNA, 27 bp, synthetic construct
  misc_feature 1..27: note = Description of Artificial Sequence: Synthetic oligonucleotide
  source 1..27: mol_type = other DNA
gcccaaggtacttggaatccgccggct

SEQ ID NO: 1119 - DNA, 27 bp, synthetic construct
  misc_feature 1..27: note = Description of Artificial Sequence: Synthetic oligonucleotide
  source 1..27: mol_type = other DNA
gcccaaactactgataggccttttttg

SEQ ID NO: 1120 - DNA, 27 bp, synthetic construct
  misc_feature 1..27: note = Description of Artificial Sequence: Synthetic oligonucleotide
  source 1..27: mol_type = other DNA
gatggcaccgctgataagccgtttcgg

SEQ ID NO: 1121 - DNA, 27 bp, synthetic construct
  misc_feature 1..27: note = Description of Artificial Sequence: Synthetic oligonucleotide
  source 1..27: mol_type = other DNA
gatggcaccgcggagaggccttttagg

SEQ ID NO: 1122 - DNA, 27 bp, synthetic construct
  misc_feature 1..27: note = Description of Artificial Sequence: Synthetic oligonucleotide
  source 1..27: mol_type = other DNA
gatggcaccggtggtattaaggggtgg

SEQ ID NO: 1123 - DNA, 27 bp, synthetic construct
  misc_feature 1..27: note = Description of Artificial Sequence: Synthetic oligonucleotide
  source 1..27: mol_type = other DNA
gatggcaccgggaatactcgggggtgg

SEQ ID NO: 1124 - DNA, 27 bp, synthetic construct
  misc_feature 1..27: note = Description of Artificial Sequence: Synthetic oligonucleotide
  source 1..27: mol_type = other DNA
gatggcacccatacgcggacgggttgg

SEQ ID NO: 1125 - DNA, 27 bp, synthetic construct
  misc_feature 1..27: note = Description of Artificial Sequence: Synthetic oligonucleotide
  source 1..27: mol_type = other DNA
gatggcaccattgagcggccttttcgt

SEQ ID NO: 1126 - DNA, 27 bp, synthetic construct
  misc_feature 1..27: note = Description of Artificial Sequence: Synthetic oligonucleotide
  source 1..27: mol_type = other DNA
gatggcaccttgaataatccgtttagg

SEQ ID NO: 1127 - DNA, 27 bp, synthetic construct
  misc_feature 1..27: note = Description of Artificial Sequence: Synthetic oligonucleotide
  source 1..27: mol_type = other DNA
gatggcaccaatggtctgaaggggtgg

SEQ ID NO: 1128 - DNA, 27 bp, synthetic construct
  misc_feature 1..27: note = Description of Artificial Sequence: Synthetic oligonucleotide
  source 1..27: mol_type = other DNA
gatggcacctcgtttacgccgcctaag

SEQ ID NO: 1129 - DNA, 27 bp, synthetic construct
  misc_feature 1..27: note = Description of Artificial Sequence: Synthetic oligonucleotide
  source 1..27: mol_type = other DNA
gatggcacctcgtttactccgccgcgg

SEQ ID NO: 1130 - DNA, 27 bp, synthetic construct
  misc_feature 1..27: note = Description of Artificial Sequence: Synthetic oligonucleotide
  source 1..27: mol_type = other DNA
gatggcaccactacgtatggggctcgt

SEQ ID NO: 1131 - DNA, 27 bp, synthetic construct
  misc_feature 1..27: note = Description of Artificial Sequence: Synthetic oligonucleotide
  source 1..27: mol_type = other DNA
gatggcaccacttggacgccgccgcgt

SEQ ID NO: 1132 - DNA, 27 bp, synthetic construct
  misc_feature 1..27: note = Description of Artificial Sequence: Synthetic oligonucleotide
  source 1..27: mol_type = other DNA
gatggcaccagttatgttcctccgagg

SEQ ID NO: 1133 - DNA, 27 bp, synthetic construct
  misc_feature 1..27: note = Description of Artificial Sequence: Synthetic oligonucleotide
  source 1..27: mol_type = other DNA
gcccaatttcctacgaattatgattct

SEQ ID NO: 1134 - DNA, 27 bp, synthetic construct
  misc_feature 1..27: note = Description of Artificial Sequence: Synthetic oligonucleotide
  source 1..27: mol_type = other DNA
gcccaacctgagggtagtgcgaggtgg

SEQ ID NO: 1135 - DNA, 27 bp, synthetic construct
  misc_feature 1..27: note = Description of Artificial Sequence: Synthetic oligonucleotide
  source 1..27: mol_type = other DNA
gcccaatggcctacgagttatgatgct

SEQ ID NO: 1136 - DNA, 27 bp, synthetic construct
  misc_feature 1..27: note = Description of Artificial Sequence: Synthetic oligonucleotide
  source 1..27: mol_type = other DNA
gatggcaccgcgattcatctttcgtct

SEQ ID NO: 1137 - DNA, 27 bp, synthetic construct
  misc_feature 1..27: note = Description of Artificial Sequence: Synthetic oligonucleotide
  source 1..27: mol_type = other DNA
gatggcaccgggcaggtgactgggtgg

SEQ ID NO: 1138 - DNA, 27 bp, synthetic construct
  misc_feature 1..27: note = Description of Artificial Sequence: Synthetic oligonucleotide
  source 1..27: mol_type = other DNA
gatggcacgatggataagccttttagg

SEQ ID NO: 1139 - DNA, 27 bp, synthetic construct
  misc_feature 1..27: note = Description of Artificial Sequence: Synthetic oligonucleotide
  source 1..27: mol_type = other DNA
gatggcacctcgagttattatgattct

SEQ ID NO: 1140 - DNA, 27 bp, synthetic construct
  misc_feature 1..27: note = Description of Artificial Sequence: Synthetic oligonucleotide
  source 1..27: mol_type = other DNA
gatggcagtagttcttattatgatgcg

SEQ ID NO: 1141 - DNA, 27 bp, synthetic construct
  misc_feature 1..27: note = Description of Artificial Sequence: Synthetic oligonucleotide
  source 1..27: mol_type = other DNA
gatggcaccgcgagttattatgattct

SEQ ID NO: 1142 - DNA, 27 bp, synthetic construct
  misc_feature 1..27: note = Description of Artificial Sequence: Synthetic oligonucleotide
  source 1..27: mol_type = other DNA
gatggcaccggtaatgtgacggggtgg

SEQ ID NO: 1143 - DNA, 27 bp, synthetic construct
  misc_feature 1..27: note = Description of Artificial Sequence: Synthetic oligonucleotide
  source 1..27: mol_type = other DNA
gcacaaggaagctggaacccaccagca

SEQ ID NO: 1144 - DNA, 27 bp, synthetic construct
  misc_feature 1..27: note = Description of Artificial Sequence: Synthetic oligonucleotide
  source 1..27: mol_type = other DNA
gcacaaaacggaaacccaggaagatgg

SEQ ID NO: 1145 - DNA, 27 bp, synthetic construct
  misc_feature 1..27: note = Description of Artificial Sequence: Synthetic oligonucleotide
  source 1..27: mol_type = other DNA
gcacaaacaacagaaaaaccatggctc

SEQ ID NO: 1146 - DNA, 27 bp, synthetic construct
  misc_feature 1..27: note = Description of Artificial Sequence: Synthetic oligonucleotide
  source 1..27: mol_type = other DNA
gacggaacagcagacagaccattcaga

SEQ ID NO: 1147 - DNA, 27 bp, synthetic construct
  misc_feature 1..27: note = Description of Artificial Sequence: Synthetic oligonucleotide
  source 1..27: mol_type = other DNA
gacggaacaatcagccaaccattcaaa

SEQ ID NO: 1148 - DNA, 27 bp, synthetic construct
  misc_feature 1..27: note = Description of Artificial Sequence: Synthetic oligonucleotide
  source 1..27: mol_type = other DNA
gacggaacactcgcagcaccattcaaa

SEQ ID NO: 1149 - DNA, 27 bp, synthetic construct
  misc_feature 1..27: note = Description of Artificial Sequence: Synthetic oligonucleotide
  source 1..27: mol_type = other DNA
gacggaacactccaacaaccattcaga

SEQ ID NO: 1150 - DNA, 27 bp, synthetic construct
  misc_feature 1..27: note = Description of Artificial Sequence: Synthetic oligonucleotide
  source 1..27: mol_type = other DNA
gacggaacactcagccaaccattcaga

SEQ ID NO: 1151 - DNA, 27 bp, synthetic construct
  misc_feature 1..27: note = Description of Artificial Sequence: Synthetic oligonucleotide
  source 1..27: mol_type = other DNA
gacggaacaatggacagaccattcaaa

SEQ ID NO: 1152 - DNA, 27 bp, synthetic construct
  misc_feature 1..27: note = Description of Artificial Sequence: Synthetic oligonucleotide
  source 1..27: mol_type = other DNA
gacggaacaagaacaacaacaggatgg

SEQ ID NO: 1153 - DNA, 27 bp, synthetic construct
  misc_feature 1..27: note = Description of Artificial Sequence: Synthetic oligonucleotide
  source 1..27: mol_type = other DNA
gacggaacaacattcacaccaccaaga

SEQ ID NO: 1154 - DNA, 27 bp, synthetic construct
  misc_feature 1..27: note = Description of Artificial Sequence: Synthetic oligonucleotide
  source 1..27: mol_type = other DNA
gacggaacaacatacgtcccaccaaga

SEQ ID NO: 1155 - DNA, 27 bp, synthetic construct
  misc_feature 1..27: note = Description of Artificial Sequence: Synthetic oligonucleotide
  source 1..27: mol_type = other DNA
gcacaaggagaaaacccaggaagatgg

SEQ ID NO: 1156 - DNA, 27 bp, synthetic construct
  misc_feature 1..27: note = Description of Artificial Sequence: Synthetic oligonucleotide
  source 1..27: mol_type = other DNA
gcacaaggaacatggaacccaccagca

SEQ ID NO: 1157 - DNA, 27 bp, synthetic construct
  misc_feature 1..27: note = Description of Artificial Sequence: Synthetic oligonucleotide
  source 1..27: mol_type = other DNA
gcacaaacaacagacagaccattcctc

SEQ ID NO: 1158 - DNA, 27 bp, synthetic construct
  misc_feature 1..27: note = Description of Artificial Sequence: Synthetic oligonucleotide
  source 1..27: mol_type = other DNA
gacggaacagcagacaaaccattcaga

SEQ ID NO: 1159 - DNA, 27 bp, synthetic construct
  misc_feature 1..27: note = Description of Artificial Sequence: Synthetic oligonucleotide
  source 1..27: mol_type = other DNA
gacggaacagcagaaagaccattcaga

SEQ ID NO: 1160 - DNA, 27 bp, synthetic construct
  misc_feature 1..27: note = Description of Artificial Sequence: Synthetic oligonucleotide
  source 1..27: mol_type = other DNA
gacggaacaggaggaatcaaaggatgg

SEQ ID NO: 1161 - DNA, 27 bp, synthetic construct
  misc_feature 1..27: note = Description of Artificial Sequence: Synthetic oligonucleotide
  source 1..27: mol_type = other DNA
gacggaacaggaaacacaagaggatgg

SEQ ID NO: 1162 - DNA, 27 bp, synthetic construct
  misc_feature 1..27: note = Description of Artificial Sequence: Synthetic oligonucleotide
  source 1..27: mol_type = other DNA
gacggaacacacacaagaacaggatgg

SEQ ID NO: 1163 - DNA, 27 bp, synthetic construct
  misc_feature 1..27: note = Description of Artificial Sequence: Synthetic oligonucleotide
  source 1..27: mol_type = other DNA
gacggaacaatcgaaagaccattcaga

SEQ ID NO: 1164 - DNA, 27 bp, synthetic construct
  misc_feature 1..27: note = Description of Artificial Sequence: Synthetic oligonucleotide
  source 1..27: mol_type = other DNA
gacggaacactcaacaacccattcaga

SEQ ID NO: 1165 - DNA, 27 bp, synthetic construct
  misc_feature 1..27: note = Description of Artificial Sequence: Synthetic oligonucleotide
  source 1..27: mol_type = other DNA
gacggaacaaacggactcaaaggatgg

SEQ ID NO: 1166 - DNA, 27 bp, synthetic construct
  misc_feature 1..27: note = Description of Artificial Sequence: Synthetic oligonucleotide
  source 1..27: mol_type = other DNA
gacggaacaagcttcacaccaccaaaa

SEQ ID NO: 1167 - DNA, 27 bp, synthetic construct
  misc_feature 1..27: note = Description of Artificial Sequence: Synthetic oligonucleotide
  source 1..27: mol_type = other DNA
gacggaacaagcttcacaccaccaaga

SEQ ID NO: 1168 - DNA, 27 bp, synthetic construct
  misc_feature 1..27: note = Description of Artificial Sequence: Synthetic oligonucleotide
  source 1..27: mol_type = other DNA
gacggaacaacaacatacggagcaaga

SEQ ID NO: 1169 - DNA, 27 bp, synthetic construct
  misc_feature 1..27: note = Description of Artificial Sequence: Synthetic oligonucleotide
  source 1..27: mol_type = other DNA
gacggaacaacatggacaccaccaaga

SEQ ID NO: 1170 - DNA, 27 bp, synthetic construct
  misc_feature 1..27: note = Description of Artificial Sequence: Synthetic oligonucleotide
  source 1..27: mol_type = other DNA
gacggaacaagctacgtcccaccaaga

SEQ ID NO: 1171 - DNA, 27 bp, synthetic construct
  misc_feature 1..27: note = Description of Artificial Sequence: Synthetic oligonucleotide
  source 1..27: mol_type = other DNA
gcacaattcccaacaaactacgacagc

SEQ ID NO: 1172 - DNA, 27 bp, synthetic construct
  misc_feature 1..27: note = Description of Artificial Sequence: Synthetic oligonucleotide
  source 1..27: mol_type = other DNA
gcacaaccagaaggaagcgcaagatgg

SEQ ID NO: 1173 - DNA, 27 bp, synthetic construct
  misc_feature 1..27: note = Description of Artificial Sequence: Synthetic oligonucleotide
  source 1..27: mol_type = other DNA
gcacaatggccaacaagctacgacgca

SEQ ID NO: 1174 - DNA, 27 bp, synthetic construct
  misc_feature 1..27: note = Description of Artificial Sequence: Synthetic oligonucleotide
  source 1..27: mol_type = other DNA
gacggaacagcaatccacctcagcagc

SEQ ID NO: 1175 - DNA, 27 bp, synthetic construct
  misc_feature 1..27: note = Description of Artificial Sequence: Synthetic oligonucleotide
  source 1..27: mol_type = other DNA
gacggaacaggacaagtcacaggatgg

SEQ ID NO: 1176 - DNA, 27 bp, synthetic construct
  misc_feature 1..27: note = Description of Artificial Sequence: Synthetic oligonucleotide
  source 1..27: mol_type = other DNA
gacggaacaatggacaaaccattcaga

SEQ ID NO: 1177 - DNA, 27 bp, synthetic construct
  misc_feature 1..27: note = Description of Artificial Sequence: Synthetic oligonucleotide
  source 1..27: mol_type = other DNA
gacggaacaagcagctactacgacagc

SEQ ID NO: 1178 - DNA, 27 bp, synthetic construct
  misc_feature 1..27: note = Description of Artificial Sequence: Synthetic oligonucleotide
  source 1..27: mol_type = other DNA
gacggaagcagcagctactacgacgca

SEQ ID NO: 1179 - DNA, 27 bp, synthetic construct
  misc_feature 1..27: note = Description of Artificial Sequence: Synthetic oligonucleotide
  source 1..27: mol_type = other DNA
gacggaacagcaagctactacgacagc

SEQ ID NO: 1180 - DNA, 27 bp, synthetic construct
  misc_feature 1..27: note = Description of Artificial Sequence: Synthetic oligonucleotide
  source 1..27: mol_type = other DNA
gacggaacaggaaacgtcacaggatgg

SEQ ID NO: 1181 - protein, 9 aa, synthetic construct
  VARIANT 4..6: note = Any amino acid
  VARIANT 9: note = May be replaced by Arg
  REGION 1..9: note = Variant residues given in the sequence have no preference with respect to those in the annotations for variant positions
  REGION 1..9: note = Description of Artificial Sequence: Synthetic peptide
DGTXXXPFK

SEQ ID NO: 1182 - protein, 9 aa, synthetic construct
  VARIANT 4..6: note = Any amino acid
  VARIANT 9: note = May be replaced by Ala
  REGION 1..9: note = Variant residues given in the sequence have no preference with respect to those in the annotations for variant positions
  REGION 1..9: note = Description of Artificial Sequence: Synthetic peptide
DGTXXXYDS

SEQ ID NO: 1183 - protein, 9 aa, synthetic construct
  VARIANT 4..7: note = Any amino acid
  REGION 1..9: note = Description of Artificial Sequence: Synthetic peptide
DGTXXXXGW

SEQ ID NO: 1184 - protein, 9 aa, synthetic construct
  VARIANT 4..6: note = Any amino acid
  VARIANT 9: note = May be replaced by Lys
  REGION 1..9: note = Variant residues given in the sequence have no preference with respect to those in the annotations for variant positions
  REGION 1..9: note = Description of Artificial Sequence: Synthetic peptide
CGTXXXPPR

SEQ ID NO: 1185 - protein, 9 aa, synthetic construct
  VARIANT 4..6: note = Any amino acid
  REGION 1..9: note = Description of Artificial Sequence: Synthetic peptide
DGTXXXPFR

1.-15. (canceled)

16. A variant adeno-associated (AAV) capsid polypeptide which comprises:
(i) the amino acid sequence of any the amino acid sequences provided in Table 2;
(ii) the amino acid sequence of SEQ ID NO: 134; or
(iii) the amino acid sequence of SEQ ID NO: 68.

17. The variant AAV capsid polypeptide of claim 16, which comprises the amino acid sequence of SEQ ID NO: 134.

18. The variant AAV capsid polypeptide of claim 16, which comprises the amino acid sequence of SEQ ID NO: 62.

19. The variant AAV capsid polypeptide of claim 16, wherein the amino acid sequence is present in loop VIII of the variant AAV capsid polypeptide.

20. The variant AAV capsid polypeptide of claim 16, wherein the amino acid sequence is present immediately subsequent to a position selected from 586-592 of the variant AAV capsid polypeptide.

21. The variant AAV capsid polypeptide of claim 16, which further comprises the amino acid sequence of SEQ ID NO: 2, or an amino acid sequence at least 95% identical thereto.

22. The variant AAV capsid polypeptide of claim 16, which further comprises the amino acid sequence of SEQ ID NO: 3, or an amino acid sequence at least 95% identical thereto.

23. An adeno-associated virus (AAV) particle comprising the variant AAV capsid polypeptide of claim 16 and a viral genome.

24. The AAV particle of claim 23, wherein the viral genome encodes one or more siRNA molecules.

25. A pharmaceutical composition comprising the AAV particle of claim 23.

26. A method of delivering a payload to a subject, the method comprising administering to the subject an AAV particle comprising the variant AAV capsid polypeptide of claim 16, thereby delivering the payload.

27. The method of claim 26, wherein the AAV particle is administered intravenously.

28. A method of treating a neurological disease in a subject, the method comprising administering to the subject an AAV particle comprising the variant AAV capsid polypeptide of claim 16, thereby treating the neurological disease in a subject.

29. The method of claim 28, wherein the AAV particle or pharmaceutical composition is administered intravenously.

30. The method of claim 28, wherein the neurological disease is Alzheimer's Disease, Amyotrophic Lateral Sclerosis (ALS), Parkinson's disease, or Huntington's Disease.
